United States Patent Application Publication US 2026/0250737 A1, published August 27, 2026 (application 19/478,669).

The application's sequence listing, which the Patent Office published only in electronic form, follows.

SEQUENCE LISTING (2873 sequences)

SEQ ID NO: 1 - protein, 118 aa, synthetic construct
MSEEQIRQFLRRFYEALDSGDADTAASLFHPGVTIHLWDGVTFTSREEFREWFERLFSTSKDAQREIKSLEVRGDTVEVHVQLHATHNGQKHTVDLTHHWHFRGNRVTEVRVHINPTG

SEQ ID NO: 2 - protein, 118 aa, synthetic construct
MSEEQIRQFLRRFYEALDSGDADTAASLFHPGVTIHLWDGVTFTSREEFREWFERLFSTSKDAWREIKSLEVRGDTVEVHVQLHFTLNGQKHTVDLTHHFHFRGNRVTEVRVHINPTG

SEQ ID NO: 3 - protein, 118 aa, synthetic construct
MSEEQIRQFLRRFYEALDSGDADTAASLFHPGVTIHLWDGVTFTSREEFREWFERLFSTSKDAQREIKSLEVRGDTVEVHVQLHFTLNGQKHTVDLTHHFHFRGNRVTEVRVHINPTG

SEQ ID NO: 4 - protein, 118 aa, synthetic construct
MSEEQIRQVLRRFYEALDSGDADTAASLFHPGVTIHLWDGVTFTSREEFREWFERLFSTSKDAWREIKSLEVRGDTVEVHVQLHFTLNGQKHTVDLTHHWHFRGNRVTEVRVHINPTG

SEQ ID NO: 5 - protein, 118 aa, synthetic construct
MSEEQIRQVLRRFYEALDSGDADTAASLFHPGVTIHLWDGVTFTSREEFREWFERLFSTSKDAQREIKSLEVRGDTVEVHVQLHFTLNGQKHTVDLTHHWHFRGNRVTEVRVHINPTG

SEQ ID NO: 6 - protein, 118 aa, synthetic construct
MSEEQIRQSLRRFYEALDSGDADTAASLFHPGVTIHLWDGVTFTSREEFREWFERLFSTSKDAWREIKSLEVRGDTVEVHVQLHFTLNGQKHTVDLTHHWHFRGNRVTEVRVHINPTG

SEQ ID NO: 7 - protein, 118 aa, synthetic construct
MSEEQIRQSLRRFYEALDSGDADTAASLFHPGVTIHLWDGVTFTSREEFREWFERLFSTSKDAQREIKSLEVRGDTVEVHVQLHFTLNGQKHTVDLTHHWHFRGNRVTEVRVHINPTG

SEQ ID NO: 8 - protein, 118 aa, synthetic construct
TSEEQIRQFLRRFYEALDSGDADTAASLFHPGVTIHLWDGVTFTSREEFREWFERLFSTSKDAQREIKSLEVRGDTVEVHVQLHATHNGQKYTVDLTHHWHFRGNRVTEVRVHINPTG

SEQ ID NO: 9 - protein, 118 aa, synthetic construct
MSEEQIRQLLRRFYEALDSGDADTAASLFHPGVTIHLWDGVTFTSREEFREWFERLFSTSKDAQREIKSLEVRDDTVEVHVQLHATHNGQKHTVDLTHHWHFRGNRVTEVRVHINPTG

SEQ ID NO: 10 - protein, 118 aa, synthetic construct
MSEEQIRQSLRRFYEALDSGDADTAASLFHPGVTIHLWDGVTFTSREEFREWFERLFTTSKDAQREIKSLEVRGDTVEVHVQLHATHNGQKHTVDLTHHWHFRGNRVTEVRVHINPTG

SEQ ID NO: 11 - protein, 118 aa, synthetic construct
MSEEQIRQFLRRFYEALDSGDADTAASLFHPGVTIHLWDGVTFTSRAEFREWFERLFSTSKDAQREIKSLEVRGDTVEVHVQLHATHNGQKHTVDLTHHWHFRGNRVTEVCVHINPTG

SEQ ID NO: 12 - protein, 118 aa, synthetic construct
MSEEQIRQFLRRFYEALDSGDADTAASLFHPGVTIHLWDGVTFTSREEFIEWFERLFSTSKDAHREIKSLEVRGDTVEVHVQLHATQNGQKHTVDLTHHWHFRGNRVTEVRVHINPTG

SEQ ID NO: 13 - protein, 118 aa, synthetic construct
MSEEQIRQSLRRFYEALDSGDADTAASLFHPGVTVHLWDGVTFTSREEFREWFERLFSTSKDAQREIKSLEVRGDTVEVHVQLHATHNGQKHTVDLTHHWHFRGNRVTEVRVHINPTG

SEQ ID NO: 14 - protein, 118 aa, synthetic construct
MSEEQIRQFLRRFYEALDSGDADTAASLFHPGVTIHLWDGVTFTSREEFREWFERQFSTSKDAQREIKSLEVRGDTVEVHVQLHATHNGQKHTVDLTHHWHFRGNRVTEVRVQINPTG

SEQ ID NO: 15 - protein, 118 aa, synthetic construct
MSEEQIRQFLRRFYEALDSGDADTAASLFHPGVTIHLWDGVTLTSREEFREWFERLFSTSKDVQREIKSLEVRGDTVEVHVQLHATHNGQKHTVDLTHHWHFRGNRVTEVRVHINPTG

SEQ ID NO: 16 - protein, 118 aa, synthetic construct
MSEEQIRQFLRRFYEALDSGDADTAASLFHPGVTIHLWDGVTFTSREEFREWFERLFSTSKDAQREIKSLEVRGDTVEVHVQLHATHNGQKHTVDLTHHWQFRGNRATEVRVHISPTG

SEQ ID NO: 17 - protein, 118 aa, synthetic construct
MSEEQIRQFLRRFYEALDSGDADTAASLFHPGVTIHLWDGVTLTSREEFREWFERLFSTSKDAQREIKSLEVRGDTVEVHVQLHATHNGQKHTVDLTHHWHFRGNRVTEVRVHINPTG

SEQ ID NO: 18 - protein, 118 aa, synthetic construct
MSEEQIRQFLRRFYEALDSGDADTAASLFHPGVTIHLWDGVTFTSREEFREWFERQFSTSKDAQREIKSLEVRGDTVEVHVQLHATHNGQKHTVDLTHHWHFRGNRVTEVRVHINPTG

SEQ ID NO: 19 - protein, 118 aa, synthetic construct
MSEEQIRQLLRRFYEALDSGDADTAASLFHPGVTIHLWDGVTFTSREEFREWFERLFSTSKDAQREIKSLEVRGDTVEVHVQLHATHNGQKHTVDLTHHWYFRGNRVTEVRVHINPTG

SEQ ID NO: 20 - protein, 118 aa, synthetic construct
MSEEQIRQFLRRFYEALDSGDADTAASLFHPGVTIHLWDGVTFTSREEFREWFERLFSTSKDAQREIKSLEVRGDTVEVHVQLHATHNGQKYTVDLTHHWHFRGNRVTEVRVHINPTG

SEQ ID NO: 21 - protein, 118 aa, synthetic construct
MSEEQIRQFLRRFYEALDSGDADTAASLFHPGVTIHLWDGVTFTSREEFKEWFERLFSTSKDAQREIKSLEVRGDTVEVHVQLHATHNGQKHTVDLTHHWHFRGNRVTEVRVHINPTD

SEQ ID NO: 22 - protein, 118 aa, synthetic construct
MSEEQIRQILRRFYEALDSGDADTAASLFHPGVTIHLWDGVTFTSREEFREWFERLFSTSKDAQREIKSLEVRGDTVEVHVQLHATHNGQKHTVDLTHHWHFRGNRVTEVRVHINPTG

SEQ ID NO: 23 - protein, 118 aa, synthetic construct
MSEEQIRQFLRRFYEALDSGDADTAASLFHPGVTFHLWDGVTFTSREESREWFERLFSTSKDAQREIKSLEVRGDTVEVHVQLHATHNGQKHTVDLTHHWHFRGNRVTEVRVHINPTG

SEQ ID NO: 24 - protein, 118 aa, synthetic construct
MSEEQIRQFLRRFYEALDRGDADTAASLFHPRVTIHLWDGVTFTSREEFREWFERLFSTSKDAQREIKSLEVRGDTVEVHVQLHATHNGQKHTVDLTHHWHFRGNRVTEVRVHINPTG

SEQ ID NO: 25 - protein, 118 aa, synthetic construct
MSEEQIRQFLRRFYEALDSGDADTAASLFHPDVTIHLWDGVTFTSREEFREWFERLFSTSKDAQREIKSLEVRGDTVEVHVQLHATHNGQKHTVDLTHHWHFRGNRVTEVRVHINPTG

SEQ ID NO: 26 - protein, 118 aa, synthetic construct
MSEEKIRQFLCRFYEALDSGDADTAASLFHPGATIHLWDGVTFTSREEFREWFERLFSTSKDAQREIKSLEVRGDTVEVHVQLHATHNGQKHTVDLTHHWHFRGNRVTEVRVHINPTG

SEQ ID NO: 27 - protein, 118 aa, synthetic construct
MSEEQIRQFLRRFYEALDSGDADTAASLFHPGVTIHLWDGVTFTSREEFREWFERLFSTSKDAQREIKSLEVRGDTVEVHVQLHATHNGQKHTVDLTHHWHFRGNRITEVRVHINPTG

SEQ ID NO: 28 - protein, 118 aa, synthetic construct
MSEEQIRQFLRRFYEALDSGDADTAASLFHPGVTIHQWDGVTFTSREEFREWFERLFSTSKDAQREIKSLEVRGDTVEVHVQLHATHNGQKHTVDLTHHWHFRGSRVTEVRVHINPTG

SEQ ID NO: 29 - protein, 118 aa, synthetic construct
MSEELIRQFLRRFYEALDSGDADTAASLFHPDVTIHLWDGVTFTSREEFREWFERLFSTSKDAHREIKSLEVRGDTVEVHVQLHATHNGQKHTVDLTHHWHFRGNRVTEVRVHINPTG

SEQ ID NO: 30 - protein, 118 aa, synthetic construct
MSEEQIRQFLRRFYEALDSGDADTAASLFHPGVTIHLWDGVTFTSREEFREWFERLFSTSKDAQREIKSLEVRGDTVEVHVQLHATHNGQKHTVDLTHHWHFRGNLVTEVRVHINPTG

SEQ ID NO: 31 - protein, 118 aa, synthetic construct
MSEEQIRQFLRRFYEALDSGDADTAASLFHPGVTIHLWDGVTFTSREEFREWFERLFSTSKDAQREIKSLEVRGDTVEVHVQLHATHNGQKHTVDLTHLWHFRGNRVTEVRVHINPTG

SEQ ID NO: 32 - protein, 118 aa, synthetic construct
MSEEQIRQFLRRFYEALDSGDADTAASLFHPGVTIHLWDGVTFTSREEFREWFERLFSTSEDAQREIKSLEVRGDTVEVHVQLHATHNGQKHTVDLTHHWHFRGNRVTEVRVHINPTG

SEQ ID NO: 33 - protein, 118 aa, synthetic construct
MSEEQIRQFLRRFYEALDSGDADTAASLFHPGVTIHLWDGVTFTSREEFREWFERLFSTSKDAHREIKSLEVRGDTVEVHVQLHATHNGQKHTVDLTHHWHFRGNRVTEVRVHINPTG

SEQ ID NO: 34 - protein, 118 aa, synthetic construct
MSEEQIRQFLRRFYEALDSGDADTAASIFHPGVTIHLWDGVTFTSREEFKEWFERLFSTSKDAQREIKSLEVRGDTVEVHVQLHATHNGQKHTVDLTHHWHFRGNRVTEVRVHINPTG

SEQ ID NO: 35 - protein, 118 aa, synthetic construct
MSEEQIRQFLRRFYEALDSGDADTAASLFHPGVTIHLWDGVTFTSREEFREWFERLFSTSKDAQREIKSLEVRGDTVEVHVQLHATHNGQKHTVDLTHHWHFRGNRVNEVRVHINPTG

SEQ ID NO: 36 - protein, 118 aa, synthetic construct
MSEEQIRQFLRRFYEALDSGDADTAASLFHPGVTIHLWDGVTFTSREEFREWFERLFSTSKDAQREIKSLEVRGDTVETHVQLHATHNGQKHTVDLTHHWHFRGNRVTEVRVHINSTG

SEQ ID NO: 37 - protein, 118 aa, synthetic construct
MSEEQIRQFLRRFYEALDSGDADTAASLFHPGVTIHLWDGVTFTSREEFREWFERLFSTSKDAQREIKSLEVRGDTVWVHVQLHATHNGQKHTVDLTHHWHFRGNRVTEVRVHINPTG

SEQ ID NO: 38 - protein, 118 aa, synthetic construct
MSEEQIRQFLRRFYEALDSGDADTAASLFHPGVTIHLWDGVTFTSREEFREWFERLFSTSKDAQREIKSLEVRGDTVEVHVQLHATHNGQKHTVDRTHHWHFRGNRVTEVRVHINPTG

SEQ ID NO: 39 - protein, 118 aa, synthetic construct
MSEEQIRQHLRRFYEALDSGDADTAASLFHPGVTIHLWDGVTFTSREEFREWFERLFSTSKDAQREIKSLEVRGDTVEVHVQLHATHNGQKHTVDLTHHWHFRGNRVTEVRVHINPTG

SEQ ID NO: 40 - protein, 118 aa, synthetic construct
MSEEQKRQFLRRFYEALDSGDADTAASLFHPGVTIHLWDGVTFTSREEFREWFERLFSTSKDAQREIKSLEVRGDTVEVHVQLHATHNGQKHTVDLTHHWHFRGNRVTEVRVHINPTG

SEQ ID NO: 41 - protein, 118 aa, synthetic construct
MSEEQIRQFLRRFYEALDSGDADTAASLFHPGVTIHLWDGVTFTSREEFREWFERLFSTSKDAQREIKSLEVRGDTVEVHVQLHATHNGQKHTVDLTHHLHFRGNRVTEVRVHINPTG

SEQ ID NO: 42 - protein, 118 aa, synthetic construct
MSEEQIRQFLRRFYEALDSGDADTAASLFHPGVTIHLWDGVTFTAREEFREWFERLFSTSKDAQREIKSLEVRGDTVEVHVQLHATHNGQKHTVDLTHHWHFRGNRVTEVRVHINPTG

SEQ ID NO: 43 - protein, 118 aa, synthetic construct
MSEEQTRQFLRRFYEALDSGDADTAASLFHPGVTIHLWDGVTFTSREEFREWFERLFSTSKDAQREIKSLEVRGDTVEVHVQLHATHNGQKHTVDLTHHWHFRGNRVTEVRVHINPTG

SEQ ID NO: 44 - protein, 118 aa, synthetic construct
MSEEQIRQTLRRFYEALDSGDADTAASLFHPGVTIHLWDGVTFTSREEFREWFERLFSTSKDAQREIKSLEVRGDTVEVHVQLHATHNGQKHTVDLTHHWHFRGNRVTEVRVHINPTG

SEQ ID NO: 45 - protein, 118 aa, synthetic construct
MSEEQIRQFLRRFYEALDSGDADTAASLFHPGVTIHLWDGVTFTSREEFREWFERLFSTSPDAQREIKSLEVRGDTVEVHVQLHATHNGQKHTVDLTHHWHFRGNRVTEVRVHINPTG

SEQ ID NO: 46 - protein, 118 aa, synthetic construct
MSEEQIRQFLRRFYEALDSGDADTAASLFHPGVTIHLWDGVTFTSREEFREWFERLVSTSKDAQREIKSLEVRGDTVEVHVQLHATHNGQKHTVDLTHHWHFRGNRVTEVRVHINPTG

SEQ ID NO: 47 - protein, 118 aa, synthetic construct
MSEEQIRQFLRRFYEALDSGDADTAASLFHPGVTIHLWDGVTFTSREEFREWFERLFSTSKDAWREIKSLEVRGDTVEVHVQLHATHNGQKHTVDLTHHWHFRGNRVTEVRVHINPTG

SEQ ID NO: 48 - protein, 118 aa, synthetic construct
MSEEQIRQFLRRFYEALDSGDADTAASFFHPGVTIHLWDGVTFTSREEFREWFERLFSTSKDAQREIKSLEVRGDTVEVHVQLHATHNGQKHTVDLTHHWHFRGNRVTEVRVHINPTG

SEQ ID NO: 49 - protein, 118 aa, synthetic construct
MSEEQIRQFLRRFYEALDSGDADTAASLFHPGVTIHLWDGVTGTSREEFREWFERLFSTSKDAQREIKSLEVRGDTVEVHVQLHATHNGQKHTVDLTHHWHFRGNRVTEVRVHINPTG

SEQ ID NO: 50 - protein, 118 aa, synthetic construct
MSEEQIRQVLRRFYEALDSGDADTAASLFHPGVTIHLWDGVTFTSREEFREWFERLFSESKDAQREIKSLEVRGDTVEVHVQLHATHNGQKHTVDLTHHWHFRGNRVTEVRVHINPTG

SEQ ID NO: 51 - protein, 118 aa, synthetic construct
MSEEQIRQFLRRFYEALDSGDADTAASLFHPHVTIHLWDGVTFTSREEFREWFERLFSTSKDAQREIKSLEVRGDTVEVHVQLHATHNGQKHTVDLTHHWHFRGNRVTEVRVHINPTG

SEQ ID NO: 52 - protein, 118 aa, synthetic construct
MSEEQIRQFLRRFYEALDSGDADTAASLFHPRVTIHLWDGVTFTSREEFREWFERLFSTSKDAQREIKSLEVRGDTVEVHVQLHATHNGQKHTVDLTHHWHFRGNRVTEVRVHINPTG

SEQ ID NO: 53 - protein, 118 aa, synthetic construct
MSEEQIRQFLRRFYEALDSGDADTAASLFHPGVTIHLWDGVTFTSREEFREWFERLFSTSKDAQREIKSLEVRGDTVEVHVQLHAAHNGQKHTVDLTHHWHFRGNRVTEVRVHINPTG

SEQ ID NO: 54 - protein, 118 aa, synthetic construct
MSEEQIRQFLRRFYEALDSGDADTAASLFHPGVTIHLWDGVTFTSREEFREWFERLFSTSKDAQREIKSLEVRGDTVEVHVQLHATHNGQKHTVDLTHHYHFRGNRVTEVRVHINPTG

SEQ ID NO: 55 - protein, 118 aa, synthetic construct
MSEEQIRQFLRRFYEALDSGDADTAASLFHPGVTIHLWDGVIFTSREEFREWFERLFSTSKDAQREIKSLEVRGDTVEVHVQLHATHNGQKHTVDLTHHWHFRGNRVTEVRVHINPTG

SEQ ID NO: 56 - protein, 118 aa, synthetic construct
MSEEQIRQFLRRFYEALDSGDAVTAASLFHPGVTIHLWDGVTFTSREEFREWFERLFSTSKDAQREIMSLEVRGDTVEVHVQLHATHNGQKHTVDLTHHWHFRGNRVTEVRVHINPTG

SEQ ID NO: 57 - protein, 118 aa, synthetic construct
MSEEQIRQFLRRFYEALDSGDADTAASLFHPGVTIHLWDGVTFTSREEFREWFERLFSQSKDAQREIKSLEVRGDTVEVHVQLHATMNGQKHTVDLTHHWHFRGNRVTEVRVHINPTG

SEQ ID NO: 58 - protein, 118 aa, synthetic construct
MSEEQIRQFLRRFYEALDSGDADTAASSFHPGVTIHLWDGVTFTSREEFREWFERLFSTSKDAQREIKSLEVRGDTVEVHVQLHATHNGQKHTVDLTHHWHFRGNRVTEVRVHINPTG

SEQ ID NO: 59 - protein, 118 aa, synthetic construct
MSEEQIRQFLRRFYEALDSGDADTAASLFHPGVTIHLWDGVTFTSREEFREWFERLFSTSKDAQREIKSLEVRGDTVEVHVQLHITHNGQKHTVDLTHHWHFRGNRVTEVRVHINPTG

SEQ ID NO: 60 - protein, 118 aa, synthetic construct
MSEEQIRQFLRRFYEALDSGDADTAASLFHPGVTIHLWDGVTFTSREEFREWFERLFSTSKDAQREIKSLEVRGDTVEVHVKLHATHNGQKHTVDLTHHWHFRGNRVTEVRVHINPTG

SEQ ID NO: 61 - protein, 118 aa, synthetic construct
MSEEQIRQFLRRFYEALDSGDADTAASLFHPGVTIHLWDGVTFTSREEFREWFERLFSTSKDAQREIKSLEVRGDTVEVHVQLHATHNGQKHTVDLTHHWHFRGNRVDEVRVHINPTG

SEQ ID NO: 62 - protein, 118 aa, synthetic construct
MSEEQIRQFLRRFYEALDSGDADTAASLFHPGVTIHLWDGVTFTSREEFREWFERLFSTSKDAQREIKSLEVRGDTYEVHVQLHATHNGQKHTVDLTHHWHFRGNRVTEVRVHINPTG

SEQ ID NO: 63 - protein, 118 aa, synthetic construct
MSEEQIRQFLRRFWEALDSGDADTAASLFHPGVTIHLWDGVTFTSREEFREWFERLFSTSKDAQREIKSLEVRGDTVEVHVQLHATHNGQKHTVDLTHHWHFRGNRVTEVRVHINPTG

SEQ ID NO: 64 - protein, 118 aa, synthetic construct
MSEEQIRQELRRFYEALDSGDADTAASLFHPGVTIHLWDGVTFTSREEFREWFERLFSTSKDAQREIKSLEVRGDTVEVHVQLHATHNGQKHTVDLTHHWHFRGNRVTEVRVHINPTG

SEQ ID NO: 65 - protein, 118 aa, synthetic construct
MSEEQIRQFLRRFYEALDSGDADTAASLFHPGVTIHLWDGVTFTSREEFREWFERLFSKSKDAQREIKSLEVRGDTVEVHVQLHATHNGQKHTVDLTHHWHFRGNRVTEVRVHINPTG

SEQ ID NO: 66 - protein, 118 aa, synthetic construct
MSDEQIRQFLRRFYEALDSGDADTAASLFHPGVTIHLWDGVTFTSREEFREWFERLFSTSKDAQREIKSLEVRGDTVEVHVQLHATHNGQKHTVDLTHHWHFRGNRVTEVRVHINPTG

SEQ ID NO: 67 - protein, 118 aa, synthetic construct
MSEEQIRQFLRRFYEALDSGDADTAASLFHPGVTIHLWDGVTFTSREEFREWFERLFSTSKDAQREIKSLEVRGDTVEVHVTLHATHNGQKHTVDLTHHWHFRGNRVTEVRVHINPTG

SEQ ID NO: 68 - protein, 118 aa, synthetic construct
MSEEQIRQFLRRFYEALDSGDADTAASLFHPAVTIHLWDGVTFTSREEFREWFERLFSTSKDAQREIKSLEVRGDTVEVHVQLHATHNGQKHTVDLTHHWHFRGNRVTEVRVHINPTG

SEQ ID NO: 69 - protein, 118 aa, synthetic construct
MSEEQIRQFLRRFYEALDSGDADTAASLFHPGVTIHLWDGVTFTSREEFREWFERRFSTSKDAQREIKSLEVRGDTVEVHVQLHATHNGQKHTVDLTHHWHFRGNRVTEVRVHINPTG

SEQ ID NO: 70 - protein, 118 aa, synthetic construct
MSEEQIRQLLRRFYEALDSGDADTAASLFHPGVTIHLWDGVTFTSREEFREWFERLFSTSKDAQREIKSLEVRGDTVEVHVQLHATHNGQKHTVDLTHHWHFRGNRVTEVRVHINPTG

SEQ ID NO: 71 - protein, 118 aa, synthetic construct
MSEEQIRQFLRRFYEALDRGDADTAASLFHPGVTIHLWDGVTFTSREEFREWFERLFSTSKDAQREIKSLEVRGDTVEVHVQLHATHNGQKHTVDLTHHWHFRGNRVTEVRVHINPTG

SEQ ID NO: 72 - protein, 118 aa, synthetic construct
MSEEQIRQALRRFYEALDSGDADTAASLFHPGVTIHLWDGVTFTSREEFREWFERLFSTSKDAQREIKSLEVRGDTVEVHVQLHATHNGQKHTVDLTHHWHFRGNRVTEVRVWINPTG

SEQ ID NO: 73 - protein, 118 aa, synthetic construct
MSEEQIRQSLRRFYEALDSGDADTAASLFHPGVTIHLWDGVTFTSREEFREWFERLFSTSKDAQREIKSLEVRGDTVEVHVQLHATHNGQKHTVDLTHHWHFRGNRVTEVRVHINPTG

SEQ ID NO: 74 - protein, 118 aa, synthetic construct
MSEEQIRQFLRRFYEALDSGDADTAASLFHPGVTIHLWDGVTFTSREEFREWFERLFSTSKDAQREIKSLEVRGDTVEVHVQLHMTHNGQKHTVDLTHHWHFRGNRVTEVRVHINPTG

SEQ ID NO: 75 - protein, 118 aa, synthetic construct
MSEEQIRQNLRRFYEALDSGDADTAASLFHPGVTIHLWDGVTFTSREEFREWFERLFSTSKDAQREIKSLEVRGDTVEVHVQLHATHNGQKHTVDLTHHWRFRGNRVTEVRVHINPTG

SEQ ID NO: 76 - protein, 118 aa, synthetic construct
MSEEQIRQFLRRFYEALDSGDADTAASLFHPEVTIHLWDGVTFTSREEFREWFERLFSTSKDAQREIKSLEVRGDTVEVHVQLHATHNGQKHTVDLTHHWHFRGNRVTEVRVHINPTG

SEQ ID NO: 77 - protein, 118 aa, synthetic construct
MSEEQIRQFLRRFYEALDSGDADTAASLFHPMVTIHLWDGVTFTSREEFREWFERLFSTSKDAQREIKSLEVRGDTVEVHVTLHATHNGQKHTVDLTHHWHFRGNRVTEVRVHINPTG

SEQ ID NO: 78 - protein, 118 aa, synthetic construct
MSEEQIRQDLRRFYEALDSGDADTAASLFHPGVTIHLWDGVTFTSREEFREWFERLFSTSKDAQREIKSLEVRGDTVEVHVQLHATHNGQKHTVDLTHHWHFRGNRVTEVRVHINPTG

SEQ ID NO: 79 - protein, 118 aa, synthetic construct
MSEEQIRQFLRRFYEALDSGDADTAASLFHPGVTIHLWDGVTFTSREEFREWFERLFSTSKDAQREIKSLEVRGDTVEVHVQLHATVNGQKHTVDLTHHWHFRGNRVTEVRVHINPTG

SEQ ID NO: 80 - protein, 118 aa, synthetic construct
MSEEQIRQMLRRFYEALDSGDADTAASLFHPGVTIHLWDGVTFTSREEFREWFERLFSTSKDAQREIKSLEVRGDTVEVHVQLHATHNGQKHTVDLTHHWHFRGNRVTEVRVHINPTG

SEQ ID NO: 81 - protein, 118 aa, synthetic construct
MSEEQIRQQLRRFYEALDSGDADTAASLFHPGVTIHLWDGVTFTSREEFREWFERLFSTSKDAQREIKSLEVRGDTVEVHVQLHATHNGQKHTVDLTHHWHFRGNRVTEVRVHINPTG

SEQ ID NO: 82 - protein, 118 aa, synthetic construct
MSEEQIRQFLRRFYEALDSGDADTAASLFHPGVTIHLWDGVTFTSREEFREWFERLFSTSKDAQREIKSLEVRGDTVEVHVQLHFTHNGQKHTVDLTHHWHFRGNRVTEVRVHINPTG

SEQ ID NO: 83 - protein, 118 aa, synthetic construct
MSEEQIRQFLRRFYEALDSGDADTAASLFHPGVTIHLWDGVTFTSREEFREWFERKFSTSKDAQREIKSLEVRGDTVEVHVQLHATHNGQKHTVDLTHHWHFRGNRVTEVRVHINPTG

SEQ ID NO: 84 - protein, 118 aa, synthetic construct
MSEEQIRQFLRRFYEALDSGDADTAASLFHPGVTIHLWDGVTFTSREEFREWFERLFSTSKDAQREIKSLEVRGDTVEVHVQLHATHNGQKHTVDLTHHWHFRGNRVTEVRVFINPTG

SEQ ID NO: 85 - protein, 118 aa, synthetic construct
MSEEQIRQFLRRFYEALDSGDADTAASLFHPGVTIHLWDGVTFTSREEFREWFERLFSTSKDAQREIKSLEVRGDTVEVHVQLHLTHNGQKHTVDLTHHWHFRGNRVTEVRVHINPTG

SEQ ID NO: 86 - protein, 118 aa, synthetic construct
MSEEQIRQVLRRFYEALDSGDADTAASLFHPGVTIHLWDGVTFTSREEFREWFERLFSTSKDAQREIKSLEVRGDTVEVHVQLHATHNGQKHTVDLTHHWHFRGNRVTEVRVHINPTG

SEQ ID NO: 87 - protein, 118 aa, synthetic construct
MSEEQIRQFLRRFYEALDSGDADTAASLFHPGVTIHLWDGVTFTSREEFREWFERLFSTSKDAQREIKSLEVRGDTVEVHVQLHYTHNGQKHTVDLTHHWHFRGNRVTEVRVHINPTG

SEQ ID NO: 88 - protein, 118 aa, synthetic construct
MSEEQIRQFLRRFYEALDSGDADTAASLFHPGVTIHLWDGVTFTSREEFREWFERLFSTSKDAQREIKSLEVRGDTVEVHVQLHATLNGQKHTVDLTHHWHFRGNRVTEVRVHINPTG

SEQ ID NO: 89 - protein, 118 aa, synthetic construct
MSEEQIRQFLRRFYGALDSGDADTAASLFHPGVTIHLWDGVTFTSREEFREWFERLFSTSKDAQREIKSLEVRGDTVEVHVQLHATHNGQKHTVDLTHHWHFRGNRVTEVRVHINPTG

SEQ ID NO: 90 - protein, 118 aa, synthetic construct
MSEEQIRQRLRRFYEALDSGDADTAASLFHPGVTIHLWDGVTFTSREEFREWFERLFSTSKDAQREIKSLEVRGDTVEVHVQLHATHNGQKHTVDLTHHWHFRGNRVTEVRVHINPTG

SEQ ID NO: 91 - protein, 118 aa, synthetic construct
MSEEQIRQCLRRFYEALDSGDADTAASLFHPGVTIHLWDGVTFTSREEFREWFERLFSTSKDAQREIKSLEVRGDTVEVHVQLHATHNGQKHTVDLTHHWHFRGNRVTEVRVHINPTG

SEQ ID NO: 92 - protein, 118 aa, synthetic construct
MSEEQIRQFLRRFYEALDSGDADTAASLFHPGVTIHLWDGVTFTSREEFREWFERLFSTRKDAQREIKSLEVRGDTVEVHVQLHATHNGQKHTVDATHHWHFRGNRVTEMRVHINPTG

SEQ ID NO: 93 - protein, 118 aa, synthetic construct
MSEEQIRQFLRRFYEALDSGDADTAASLFHPGVTIHLWDGVTFTSREEFREWFERLFSTSKDAQREIKSLEVRGDTVEVHVQLHATHNGQKHTVDLTHHWHFRGNRVXEVRVHINPTG

SEQ ID NO: 94 - protein, 118 aa, synthetic construct
MSEEQIRQALRRFYEALDSGDADTAASLFHPGVTIHLWDGVTFTSREEFREWFERLFSTSKDAQREIKSLEVRGDTVEVHVQLHATHNGQKHTVDLTHHWHFRGNRVTEVRVHINPTG

SEQ ID NO: 95 - protein, 118 aa, synthetic construct
MSEEQIRQFLRRFYEALDSGDADTAASLFHPGVTIHLWDGVTFTSREEFREWFERLFSTSKDAQREIKSLEVRGDTVEVHVQLHATHNGQKHTVDLTHHFHFRGNRVTEVRVHINPTG

SEQ ID NO: 96 - protein, 118 aa, synthetic construct
MSEEQIRQGLRRFYEALDSGDADTAASLFHPGVTIHLWDGVTFTSREEFREWFERLFSTSKDAQREIKSLEVRGDTVEVHVQLHATHNGQKHTVDLTHHWHFRGNRVTEVRVHINPTG

SEQ ID NO: 97 - protein, 118 aa, synthetic construct
MSEEQIRQSLRRFYEALDRGDADTAASLFHPDVTIHLWDGVTFTSREEFREWFERQFSTSKDAQREIKSLEVRGDTVEVHVKLHATHNGQKHTVDLTHLFHFRGNRVNEVRVYINPTG

SEQ ID NO: 98 - protein, 118 aa, synthetic construct
MSEEQIRQSLRRFYEALDSGDADTAASLFHPHVTIHLWDGVTFTSREEFREWFERRFSTSKDAQREIKSLEVRGDTVEVHVQLHATHNGQKHTVDLTHLFHFRGNRVTEVRVYINPTG

SEQ ID NO: 99 - protein, 118 aa, synthetic construct
MSEEQIRQGLRRFYEALDSGDADTAASFFHPQVTIHLWDGVTFTSREEFREWFERRFSTSPDAQREIKSLEVRGDTVEVHVKLHATHNGQKHTVDLTHLFHFRGNRVDEVRVYINPTG

SEQ ID NO: 100 - protein, 118 aa, synthetic construct
MSEEQIRQHLRRFYEALDSGDADTAASLFHPDVTIHLWDGVTFTSREEFREWFERRFSTSKDAQREIKSLEVRGDTVEVHVTLHATHNGQKHTVDLTHHFHFRGNRVAEVRVFINPTG

SEQ ID NO: 101 - protein, 118 aa, synthetic construct
MSEEQIRQVLRRFYEALDSGDADTAASFFHPDVTIHLWDGVTFTSREEFREWFERRFSTSKDAQREIKSLEVRGDTVEVHVKLHATHNGQKHTVDLTHHFHFRGNRVNEVRVLINPTG

SEQ ID NO: 102 - protein, 118 aa, synthetic construct
MSEEQIRQGLRRFYEALDRGDADTAASLFHPEVTIHLWDGVTFTSREEFREWFERMFSTSKDASREIKSLEVRGDTVEVHVQLHLTHNGQKHTVDLTHLFHFRGNRVDEVRVHINPTG

SEQ ID NO: 103 - protein, 118 aa, synthetic construct
MSEEQIRQLLRRFYEALDSGDADTAASLFHPGVTIHLWDGVTFTSREEFREWFERLFSTSKDAFREIKSLEVRGDTVEVHVQLHFTRNGQKHTVDLTHLFHFRGNRVDEVRVYINPTG

SEQ ID NO: 104 - protein, 118 aa, synthetic construct
MSEEQIRQNLRRFYEALDSGDADTAASLFHPGVTIHLWDGVTFTSREEFREWFERLFSTSKDALREIKSLEVRGDTVEVHVQLHFTRNGQKHTVDLTHLFHFRGNRVDEVRVYINPTG

SEQ ID NO: 105 - protein, 118 aa, synthetic construct
MSEEQIRQALRRFYEALDRGDADTAASLFHPGVTIHLWDGVTFTSREEFREWFERLFSTSKDANREIKSLEVRGDTVEVHVQLHYTRNGQKHTVDLTHHFHFRGNRVNEVRVYINPTG

SEQ ID NO: 106 - protein, 118 aa, synthetic construct
MSEEQIRQLLRRFYEALDRGDADTAASFFHPQVTIHLWDGVTFTSREEFREWFERRFSTSTDAQREIKSLEVRGDTVEVHVTLHATHNGQKHTVDLTHLFHFRGNRVDEVRVLINPTG

SEQ ID NO: 107 - protein, 118 aa, synthetic construct
MSEEQIRQDLRRFYEALDRGDADTAASLFHPHVTIHLWDGVTFTSREEFREWFERRFSTSQDAQREIKSLEVRGDTVEVHVKLHATHNGQKHTVDLTHLFHFRGNRVDEVRVYINPTG

SEQ ID NO: 108 - protein, 118 aa, synthetic construct
MSEEQIRQGLRRFYEALDSGDADTAASFFHPQVTIHLWDGVTFTSREEFREWFERRFSTSPDAQREIKSLEVRGDTVEVHVKLHATHNGQKHTVDLTHLWHFRGNRVDEVRVYINPTG

SEQ ID NO: 109 - protein, 118 aa, synthetic construct
MSEEQIRQVLRRFYEALDSGDADTAASFFHPDVTIHLWDGVTFTSREEFREWFERRFSTSKDAQREIKSLEVRGDTVEVHVKLHATHNGQKHTVDLTHHWHFRGNRVNEVRVLINPTG

SEQ ID NO: 110 - protein, 118 aa, synthetic construct
MSEEQIRQSLRRFYEALDSGDADTAASLFHPHVTIHLWDGVTFTSREEFREWFERRFSTSKDAQREIKSLEVRGDTVEVHVQLHATHNGQKHTVDLTHLWHFRGNRVTEVRVYINPTG

SEQ ID NO: 111 - protein, 118 aa, synthetic construct
MSEEQIRQSLRRFYEALDSGDADTAASLFHPDVTIHLWDGVTFTSREEFREWFERRFSTSTDAQREIKSLEVRGDTVEVHVTLHATHNGQKHTVDLTHHWHFRGNRVDEVRVLINPTG

SEQ ID NO: 112 - protein, 118 aa, synthetic construct
MSEEQIRQRLRRFYEALDRGDADTAASLFHPEVTIHLWDGVTFTSREEFREWFERRFSTSKDAQREIKSLEVRGDTVEVHVQLHATHNGQKHTVDLTHLWHFRGNRVAEVRVLINPTG

SEQ ID NO: 113 - protein, 118 aa, synthetic construct
MSEEQIRQHLRRFYEALDSGDADTAASLFHPDVTIHLWDGVTFTSREEFREWFERRFSTSKDAQREIKSLEVRGDTVEVHVTLHATHNGQKHTVDLTHHWHFRGNRVAEVRVFINPTG

SEQ ID NO: 114 - protein, 118 aa, synthetic construct
MSEEQIRQGLRRFYEALDRGDADTAASLFHPEVTIHLWDGVTFTSREEFREWFERMFSTSKDASREIKSLEVRGDTVEVHVQLHLTHNGQKHTVDLTHLWHFRGNRVDEVRVHINPTG

SEQ ID NO: 115 - protein, 118 aa, synthetic construct
MSEEEIRQKLRRFYEALDSGDADTAASLFHPGVTIHLWDGVTFTSREEFREWFERRFSTSKDAQREIKSLEVRGDTVEVHVTLHATHNGQKHTVDLTHLWHFRGNRVNEVRVYINPTG

SEQ ID NO: 116 - protein, 118 aa, synthetic construct
MSEEQIRQKLRRFYEALDSGDADTAASLFHPGVTIHLWDGVTFTSREEFREWFERLFSTSKDAVREIKSLEVRGDTVEVHVQLHFTRNGQKHTVDLTHHWHFRGNRVTEVRVHINPTG

SEQ ID NO: 117 - protein, 118 aa, synthetic construct
MSEEQIRQLLRRFYEALDSGDADTAASLFHPGVTIHLWDGVTFTSREEFREWFERLFSTSKDAFREIKSLEVRGDTVEVHVQLHFTRNGQKHTVDLTHLWHFRGNRVDEVRVYINPTG

SEQ ID NO: 118 - protein, 118 aa, synthetic construct
MSEEQIRQSLRRFYEALDSGDADTAASLFHPGVTIHLWDGVTFTSREEFREWFERRFSTSPDAQREIKSLEVRGDTVEVHVTLHATHNGQKHTVDLTHHWHFRGNRVDEVRVYINPTG

SEQ ID NO: 119 - protein, 118 aa, synthetic construct
MSEEQIRQKLRRFYEALDRGDADTAASLFHPEVTIHLWDGVTFTSREEFREWFERKFSTSKDAQREIKSLEVRGDTVEVHVKLHATHNGQKHTVDLTHHWHFRGNRVNEVRVYINPTG

SEQ ID NO: 120 - protein, 118 aa, synthetic construct
MSEEQIRQKLRRFYEALDSGDADTAASLFHPGVTIHLWDGVTFTSREEFREWFERRFSTSPDAQREIKSLEVRGDTVEVHVTLHATHNGQKHTVDLTHLWHFRGNRVDEVRVFINPTG

SEQ ID NO: 121 - protein, 118 aa, synthetic construct
MSEEQIRQDLRRFYEALDRGDADTAASFFHPAVTIHLWDGVTFTSREEFREWFERRFSTSKDAQREIKSLEVRGDTVEVHVKLHATHNGQKHTVDLTHLWHFRGNRVDEVRVYINPTG

SEQ ID NO: 122 - protein, 118 aa, synthetic construct
MSEEQIRQLLRRFYEALDSGDADTAASLFHPDVTIHLWDGVTFTSREEFREWFERRFSTSEDAQREIKSLEVRGDTVEVHVTLHATHNGQKHTVDLTHLWHFRGNRVTEVRVFINPTG

SEQ ID NO: 123 - protein, 118 aa, synthetic construct
MSEEQIRQCLRRFYEALDRGDADTAASFFHPDVTIHLWDGVTFTSREEFREWFERRFSTSKDAQREIKSLEVRGDTVEVHVTLHATHNGQKHTVDLTHLWHFRGNRVNEVRVLINPTG

SEQ ID NO: 124 - protein, 118 aa, synthetic construct
MSEEQIRQSLRRFYEALDRGDADTAASLFHPDVTIHLWDGVTFTSREEFREWFERQFSTSKDAQREIKSLEVRGDTVEVHVKLHATHNGQKHTVDLTHLWHFRGNRVNEVRVYINPTG

SEQ ID NO: 125 - protein, 118 aa, synthetic construct
MSEEQIRQELRRFYEALDRGDADTAASLFHPDVTIHLWDGVTFTSREEFREWFERRFSTSQDAQREIKSLEVRGDTVEVHVKLHATHNGQKHTVDLTHLWHFRGNRVNEVRVFINPTG

SEQ ID NO: 126 - protein, 118 aa, synthetic construct
MSEEQIRQLLRRFYEALDSGDADTAASLFHPGVTIHLWDGVTFTSREEFREWFERLFSTSKDAYREIKSLEVRGDTVEVHVQLHFTRNGQKHTVDLTHHWHFRGNRVTEVRVHINPTG

SEQ ID NO: 127 - protein, 118 aa, synthetic construct
MSEEQIRQTLRRFYEALDSGDADTAASLFHPGVTIHLWDGVTFTSREEFREWFERRFSTSQDAQREIKSLEVRGDTVEVHVKLHATHNGQKHTVDLTHHWHFRGNRVNEVRVFINPTG

SEQ ID NO: 128 - protein, 118 aa, synthetic construct
MSEEQIRQNLRRFYEALDSGDADTAASLFHPGVTIHLWDGVTFTSREEFREWFERLFSTSKDALREIKSLEVRGDTVEVHVQLHFTRNGQKHTVDLTHLWHFRGNRVDEVRVYINPTG

SEQ ID NO: 129 - protein, 118 aa, synthetic construct
MSEEQIRQYLRRFYEALDSGDADTAASLFHPGVTIHLWDGVTFTSREEFREWFERRFSTSPDAQREIKSLEVRGDTVEVHVQLHFTVNGQKHTVDLTHHWHFRGNRVDEVRVLINPTG

SEQ ID NO: 130 - protein, 118 aa, synthetic construct
MSEEQIRQGLRRFYEALDSGDADTAASLFHPGVTIHLWDGVTFTSREEFREWFERLFSTSKDAYREIKSLEVRGDTVEVHVQLHVTVNGQKHTVDLTHHWHFRGNRVDEVRVYINPTG

SEQ ID NO: 131 - protein, 118 aa, synthetic construct
MSEEQIRQILRRFYEALDSGDADTAASLFHPGVTIHLWDGVTFTSREEFREWFERMFSTSKDASREIKSLEVRGDTVEVHVQLHLTRNGQKHTVDLTHHWHFRGNRVTEVRVYINPTG

SEQ ID NO: 132 - protein, 118 aa, synthetic construct
MSEEQIRQILRRFYEALDRGDADTAASLFHPPVTIHLWDGVTFTSREEFREWFERRFSTSKDAYREIKSLEVRGDTVEVHVQLHLTHNGQKHTVDLTHHWHFRGNRVTEVRVFINPTG

SEQ ID NO: 133 - protein, 118 aa, synthetic construct
MSEEQIRQSLRRFYEALDSGDADTAASLFHPGVTIHLWDGVTFTSREEFREWFERLFSTSKDAKREIKSLEVRGDTVEVHVQLHFTVNGQKHTVDLTHHWHFRGNRVTEVRVHINPTG

SEQ ID NO: 134 - protein, 118 aa, synthetic construct
MSEEQIRQKLRRFYEALESGDADTAASLFHPGVTIHLWDGVTFTSREEFREWFERLFSTSKDAHREIKSLEVRGDTVEVHVQLHYTRNGQKHTVDLTHHWHFRGNRVDEVRVFINPTG

SEQ ID NO: 135 - protein, 118 aa, synthetic construct
MSEEQIRQELRRFYEALDRGDADTAASLFHPQVTIHLWDGVTFTSREEFREWFERRFSTSKDANREIKSLEVRGDTVEVHVQLHFTHNGQKHTVDLTHLWHFRGNRVNEVRVYINPTG

SEQ ID NO: 136 - protein, 118 aa, synthetic construct
MSEEQIRQALRRFYEALDRGDADTAASLFHPGVTIHLWDGVTFTSREEFREWFERLFSTSKDANREIKSLEVRGDTVEVHVQLHYTRNGQKHTVDLTHHWHFRGNRVNEVRVYINPTG

SEQ ID NO: 137 - protein, 118 aa, synthetic construct
MSEEQIRQSLRRFYEALDRGDADTAASLFHPGVTIHLWDGVTFTSREEFREWFERRFSTSQDAQREIKSLEVRGDTVEVHVKLHFTLNGQKHTVDLTHLFHFRGNRVNEVRVLINPTG

SEQ ID NO: 138 - protein, 118 aa, synthetic construct
MSEEQIRQLLRRFYEALDRGDADTAASSFHPAVTIHLWDGVTFTSREEFREWFERQFSTSKDAWREIKSLEVRGDTVEVHVKLHKTDNGQKHTVDLTHLFHFRGNRVNEVRVYINPTG

SEQ ID NO: 139 - protein, 118 aa, synthetic construct
MSEEQIRQWLRRFYEALDRGDADTAASLFHPEVTIHLWDGVTFTSREEFREWFERRFSTSKDAQREIKSLEVRGDTVEVHVKLHATLNGQKHTVDLTHLFHFRGNRVDEVRVLINPTG

SEQ ID NO: 140 - protein, 118 aa, synthetic construct
MSEEQIRQALRRFYEALDRGDADTAASFFHPQVTIHLWDGVTFTSREEFREWFERRFSTSKDAWREIKSLEVRGDTVEVHVKLHYTHNGQKHTVDLTHLYHFRGNRVNEVRVLINPTG

SEQ ID NO: 141 - protein, 118 aa, synthetic construct
MSEEQIRQILRRFYEALDRGDADTAASLFHPAVTIHLWDGVTFTSREEFREWFERRFSTSQDAWREIKSLEVRGDTVEVHVKLHYTDNGQKHTVDLTHLFHFRGNRVNEVRVLINPTG

SEQ ID NO: 142 - protein, 118 aa, synthetic construct
MSEEQIRQNLRRFYEALDRGDADTAASFFHPEVTIHLWDGVTFTSREEFREWFERRFSTSKDARREIKSLEVRGDTVEVHVKLHFTLNGQKHTVDLTHHFHFRGNRVAEVRVLINPTG

SEQ ID NO: 143 - protein, 118 aa, synthetic construct
MSEEQIRQMLRRFYEALDSGDADTAASSFHPEVTIHLWDGVTFTSREEFREWFERRFSTSPDAWREIKSLEVRGDTVEVHVKLHYTHNGQKHTVDLTHLLHFRGNRVDEVRVFINPTG

SEQ ID NO: 144 - protein, 127 aa, synthetic construct
GQKHTVDLTHHFHFRGNRVTEVRVHINPTTGGPPPPPGGMSEEQIRQFLRRFYEALDSGDADTAASLFHPGVTIHLWDGVTFTSREEFREWFERLFSTSKDAWREIKSLEVRGDTVEVHVQLHFTLN

SEQ ID NO: 145 - protein, 127 aa, synthetic construct
GQKHTVDLTHHFHFRGNRVTEVRVHITPAGGPREPEEGALPEEQIRQFLRRFYEALDSGDADTAASLFHPGVTIHLWDGVTFTSREEFREWFERLFSTSKDAWREIKSLEVRGDTVEVHVQLHFTLN

SEQ ID NO: 146 - protein, 127 aa, synthetic construct
GQKHTVDLTHHFHFRGNRVTEVRVHITPAGGPREPEEGELPEEQIRQFLRRFYEALDSGDADTAASLFHPGVTIHLWDGVTFTSREEFREWFERLFSTSKDAWREIKSLEVRGDTVEVHVQLHFTLN

SEQ ID NO: 147 - protein, 127 aa, synthetic construct
GQKHTVDLTHHFHFRGNRVTEVRVHITPEGGPLEPEEGRLPEEQIRQFLRRFYEALDSGDADTAASLFHPGVTIHLWDGVTFTSREEFREWFERLFSTSKDAWREIKSLEVRGDTVEVHVQLHFTLN

SEQ ID NO: 148 - protein, 127 aa, synthetic construct
GQKHTVDLTHHFHFRGNRVTEVRVHITPAGGPREPEEGEVPEEQIRQFLRRFYEALDSGDADTAASLFHPGVTIHLWDGVTFTSREEFREWFERLFSTSKDAWREIKSLEVRGDTVEVHVQLHFTLN

SEQ ID NO: 149 - protein, 127 aa, synthetic construct
GQKHTVDLTHHFHFRGNRVTEVRVHITPEGGPREPEEGELPEEQIRQFLRRFYEALDSGDADTAASLFHPGVTIHLWDGVTFTSREEFREWFERLFSTSKDAWREIKSLEVRGDTVEVHVQLHFTLN

SEQ ID NO: 150 - protein, 127 aa, synthetic construct
GQKHTVDLTHHFHFRGNRVTEVRVHIVPEGGPREPEEGAVPEEQIRQFLRRFYEALDSGDADTAASLFHPGVTIHLWDGVTFTSREEFREWFERLFSTSKDAWREIKSLEVRGDTVEVHVQLHFTLN

SEQ ID NO: 151 - protein, 127 aa, synthetic construct
GQKHTVDLTHHFHFRGNRVTEVRVHITPAGGPREPEEGAVPEEQIRQFLRRFYEALDSGDADTAASLFHPGVTIHLWDGVTFTSREEFREWFERLFSTSKDAWREIKSLEVRGDTVEVHVQLHFTLN

SEQ ID NO: 152 - protein, 128 aa, synthetic construct
GQKHTVDLTHHFHFRGNRVTEVRVHINPTTGGPPPPPPPGMSEEQIRQFLRRFYEALDSGDADTAASLFHPGVTIHLWDGVTFTSREEFREWFERLFSTSKDAWREIKSLEVRGDTVEVHVQLHFTLN

SEQ ID NO: 153 - protein, 128 aa, synthetic construct
GQKHTVDLTHHFHFRGNRVTEVRVHIYPVGGPPPEPPEGEVPEEQIRQFLRRFYEALDSGDADTAASLFHPGVTIHLWDGVTFTSREEFREWFERLFSTSKDAWREIKSLEVRGDTVEVHVQLHFTLN

SEQ ID NO: 154 - protein, 128 aa, synthetic construct
GQKHTVDLTHHFHFRGNRVTEVRVHITPTGGPGPEPPEGEVPEEQIRQFLRRFYEALDSGDADTAASLFHPGVTIHLWDGVTFTSREEFREWFERLFSTSKDAWREIKSLEVRGDTVEVHVQLHFTLN

SEQ ID NO: 155 - protein, 128 aa, synthetic construct
GQKHTVDLTHHFHFRGNRVTEVRVHIHPVGGPPPEPPEGEVPEEQIRQFLRRFYEALDSGDADTAASLFHPGVTIHLWDGVTFTSREEFREWFERLFSTSKDAWREIKSLEVRGDTVEVHVQLHFTLN

SEQ ID NO: 156 - protein, 128 aa, synthetic construct
GQKHTVDLTHHFHFRGNRVTEVRVHITPVGGPPPEPPEGEVPEEQIRQFLRRFYEALDSGDADTAASLFHPGVTIHLWDGVTFTSREEFREWFERLFSTSKDAWREIKSLEVRGDTVEVHVQLHFTLN

SEQ ID NO: 157 - protein, 128 aa, synthetic construct
GQKHTVDLTHHFHFRGNRVTEVRVHIYPTGGPPPEPPEGEVPEEQIRQFLRRFYEALDSGDADTAASLFHPGVTIHLWDGVTFTSREEFREWFERLFSTSKDAWREIKSLEVRGDTVEVHVQLHFTLN

SEQ ID NO: 158 - protein, 128 aa, synthetic construct
GQKHTVDLTHHFHFRGNRVTEVRVHIYPAGGPPPEPPEGEVPEEQIRQFLRRFYEALDSGDADTAASLFHPGVTIHLWDGVTFTSREEFREWFERLFSTSKDAWREIKSLEVRGDTVEVHVQLHFTLN

SEQ ID NO: 159 - protein, 128 aa, synthetic construct
GQKHTVDLTHHFHFRGNRVTEVRVHIYPSGGPPPEPPTGEVPEEQIRQFLRRFYEALDSGDADTAASLFHPGVTIHLWDGVTFTSREEFREWFERLFSTSKDAWREIKSLEVRGDTVEVHVQLHFTLN

SEQ ID NO: 160 - protein, 128 aa, synthetic construct
GQKHTVDLTHHFHFRGNRVTEVRVHIHPTGGPPPEPPEGEVPEEQIRQFLRRFYEALDSGDADTAASLFHPGVTIHLWDGVTFTSREEFREWFERLFSTSKDAWREIKSLEVRGDTVEVHVQLHFTLN

SEQ ID NO: 161 - protein, 128 aa, synthetic construct
GQKHTVDLTHHFHFRGNRVTEVRVHIFPTGGPPPEPPEGEVPEEQIRQFLRRFYEALDSGDADTAASLFHPGVTIHLWDGVTFTSREEFREWFERLFSTSKDAWREIKSLEVRGDTVEVHVQLHFTLN

SEQ ID NO: 162 - protein, 128 aa, synthetic construct
GQKHTVDLTHHFHFRGNRVTEVRVHIYPSGGPPPEPPEGEVPEEQIRQFLRRFYEALDSGDADTAASLFHPGVTIHLWDGVTFTSREEFREWFERLFSTSKDAWREIKSLEVRGDTVEVHVQLHFTLN

SEQ ID NO: 163 - protein, 128 aa, synthetic construct
GQKHTVDLTHHFHFRGNRVTEVRVHIYPEGGPPPEPPEGEVPEEQIRQFLRRFYEALDSGDADTAASLFHPGVTIHLWDGVTFTSREEFREWFERLFSTSKDAWREIKSLEVRGDTVEVHVQLHFTLN

SEQ ID NO: 164 - protein, 128 aa, synthetic construct
GQKHTVDLTHHFHFRGNRVTEVRVHIYPEGGPPPEPPTGAVPEEQIRQFLRRFYEALDSGDADTAASLFHPGVTIHLWDGVTFTSREEFREWFERLFSTSKDAWREIKSLEVRGDTVEVHVQLHFTLN

SEQ ID NO: 165 - protein, 128 aa, synthetic construct
GQKHTVDLTHHFHFRGNRVTEVRVHIYPTGGPPPEPPEGDVPEEQIRQFLRRFYEALDSGDADTAASLFHPGVTIHLWDGVTFTSREEFREWFERLFSTSKDAWREIKSLEVRGDTVEVHVQLHFTLN

SEQ ID NO: 166 - protein, 129 aa, synthetic construct
GQKHTVDLTHHFHFRGNRVTEVRVHINPTTGGPPPPPPGPPMSEEQIRQFLRRFYEALDSGDADTAASLFHPGVTIHLWDGVTFTSREEFREWFERLFSTSKDAWREIKSLEVRGDTVEVHVQLHFTLN

SEQ ID NO: 167 - protein, 129 aa, synthetic construct
GQKHTVDLTHHFHFRGNRVTEVRVHIHPGSGPAVPREGAADISEEQIRQFLRRFYEALDSGDADTAASLFHPGVTIHLWDGVTFTSREEFREWFERLFSTSKDAWREIKSLEVRGDTVEVHVQLHFTLN

SEQ ID NO: 168 - protein, 129 aa, synthetic construct
GQKHTVDLTHHFHFRGNRVTEVRVHIDPAGGPAEPEEGEADISEEQIRQFLRRFYEALDSGDADTAASLFHPGVTIHLWDGVTFTSREEFREWFERLFSTSKDAWREIKSLEVRGDTVEVHVQLHFTLN

SEQ ID NO: 169 - protein, 129 aa, synthetic construct
GQKHTVDLTHHFHFRGNRVTEVRVHIHPGAGPAEPREGEADISEEQIRQFLRRFYEALDSGDADTAASLFHPGVTIHLWDGVTFTSREEFREWFERLFSTSKDAWREIKSLEVRGDTVEVHVQLHFTLN

SEQ ID NO: 170 - protein, 129 aa, synthetic construct
GQKHTVDLTHHFHFRGNRVTEVRVHIHPGGGPAEPREGEADISEEQIRQFLRRFYEALDSGDADTAASLFHPGVTIHLWDGVTFTSREEFREWFERLFSTSKDAWREIKSLEVRGDTVEVHVQLHFTLN

SEQ ID NO: 171 - protein, 129 aa, synthetic construct
GQKHTVDLTHHFHFRGNRVTEVRVHIHPDGGPAVPREGEADISEEQIRQFLRRFYEALDSGDADTAASLFHPGVTIHLWDGVTFTSREEFREWFERLFSTSKDAWREIKSLEVRGDTVEVHVQLHFTLN

SEQ ID NO: 172 - protein, 129 aa, synthetic construct
GQKHTVDLTHHFHFRGNRVTEVRVHIDPEGGPAVPRTGEATISEEQIRQFLRRFYEALDSGDADTAASLFHPGVTIHLWDGVTFTSREEFREWFERLFSTSKDAWREIKSLEVRGDTVEVHVQLHFTLN

SEQ ID NO: 173 - protein, 129 aa, synthetic construct
GQKHTVDLTHHFHFRGNRVTEVRVHIHPAGGPAVPREGEATISEEQIRQFLRRFYEALDSGDADTAASLFHPGVTIHLWDGVTFTSREEFREWFERLFSTSKDAWREIKSLEVRGDTVEVHVQLHFTLN

SEQ ID NO: 174 - protein, 129 aa, synthetic construct
GQKHTVDLTHHFHFRGNRVTEVRVHIHPGAGPAVPREGEATISEEQIRQFLRRFYEALDSGDADTAASLFHPGVTIHLWDGVTFTSREEFREWFERLFSTSKDAWREIKSLEVRGDTVEVHVQLHFTLN

SEQ ID NO: 175 - protein, 129 aa, synthetic construct
GQKHTVDLTHHFHFRGNRVTEVRVHIHPGGGPAVPREGEADISEEQIRQFLRRFYEALDSGDADTAASLFHPGVTIHLWDGVTFTSREEFREWFERLFSTSKDAWREIKSLEVRGDTVEVHVQLHFTLN

SEQ ID NO: 176 - protein, 129 aa, synthetic construct
GQKHTVDLTHHFHFRGNRVTEVRVHIHPAGGPAVPEEGEADISEEQIRQFLRRFYEALDSGDADTAASLFHPGVTIHLWDGVTFTSREEFREWFERLFSTSKDAWREIKSLEVRGDTVEVHVQLHFTLN

SEQ ID NO: 177 - protein, 129 aa, synthetic construct
GQKHTVDLTHHFHFRGNRVTEVRVHIDPDGGPAVPEEGEADISEEQIRQFLRRFYEALDSGDADTAASLFHPGVTIHLWDGVTFTSREEFREWFERLFSTSKDAWREIKSLEVRGDTVEVHVQLHFTLN

SEQ ID NO: 178 - protein, 129 aa, synthetic construct
GQKHTVDLTHHFHFRGNRVTEVRVHIHPGGGPAVPEEGEADISEEQIRQFLRRFYEALDSGDADTAASLFHPGVTIHLWDGVTFTSREEFREWFERLFSTSKDAWREIKSLEVRGDTVEVHVQLHFTLN

SEQ ID NO: 179 - protein, 129 aa, synthetic construct
GQKHTVDLTHHFHFRGNRVTEVRVHIHPEGAPAEPEEGEADISEEQIRQFLRRFYEALDSGDADTAASLFHPGVTIHLWDGVTFTSREEFREWFERLFSTSKDAWREIKSLEVRGDTVEVHVQLHFTLN

SEQ ID NO: 180 - protein, 129 aa, synthetic construct
GQKHTVDLTHHFHFRGNRVTEVRVHITPGGGPAVPEEGEATISEEQIRQFLRRFYEALDSGDADTAASLFHPGVTIHLWDGVTFTSREEFREWFERLFSTSKDAWREIKSLEVRGDTVEVHVQLHFTLN

SEQ ID NO: 181 - protein, 129 aa, synthetic construct
GQKHTVDLTHHFHFRGNRVTEVRVHIHPAGGPAVPEEGEADVSEEQIRQFLRRFYEALDSGDADTAASLFHPGVTIHLWDGVTFTSREEFREWFERLFSTSKDAWREIKSLEVRGDTVEVHVQLHFTLN

SEQ ID NO: 182 - protein, 129 aa, synthetic construct
GQKHTVDLTHHFHFRGNRVTEVRVHIHPGSGPAVPREGEATISEEQIRQFLRRFYEALDSGDADTAASLFHPGVTIHLWDGVTFTSREEFREWFERLFSTSKDAWREIKSLEVRGDTVEVHVQLHFTLN

SEQ ID NO: 183 - protein, 129 aa, synthetic construct
GQKHTVDLTHHFHFRGNRVTEVRVHIHPGSGPATPREGEADISEEQIRQFLRRFYEALDSGDADTAASLFHPGVTIHLWDGVTFTSREEFREWFERLFSTSKDAWREIKSLEVRGDTVEVHVQLHFTLN

SEQ ID NO: 184 - protein, 129 aa, synthetic construct
GQKHTVDLTHHFHFRGNRVTEVRVHIHPAGGPAEPREGEADISEEQIRQFLRRFYEALDSGDADTAASLFHPGVTIHLWDGVTFTSREEFREWFERLFSTSKDAWREIKSLEVRGDTVEVHVQLHFTLN

SEQ ID NO: 185 - protein, 130 aa, synthetic construct
GQKHTVDLTHHFHFRGNRVTEVRVHINPTTGGPPPPPPEGPGMSEEQIRQFLRRFYEALDSGDADTAASLFHPGVTIHLWDGVTFTSREEFREWFERLFSTSKDAWREIKSLEVRGDTVEVHVQLHFTLN

SEQ ID NO: 186 - protein, 130 aa, synthetic construct
GQKHTVDLTHHFHFRGNRVTEVRVHIYPAGGPPPSSPSGEADLSEEQIRQFLRRFYEALDSGDADTAASLFHPGVTIHLWDGVTFTSREEFREWFERLFSTSKDAWREIKSLEVRGDTVEVHVQLHFTLN

SEQ ID NO: 187 - protein, 130 aa, synthetic construct
GQKHTVDLTHHFHFRGNRVTEVRVHIYPAGGPPPSSPSGEASLSEEQIRQFLRRFYEALDSGDADTAASLFHPGVTIHLWDGVTFTSREEFREWFERLFSTSKDAWREIKSLEVRGDTVEVHVQLHFTLN

SEQ ID NO: 188 - protein, 130 aa, synthetic construct
GQKHTVDLTHHFHFRGNRVTEVRVHIYPAGGPPPSTPSGEADLTEEQIRQFLRRFYEALDSGDADTAASLFHPGVTIHLWDGVTFTSREEFREWFERLFSTSKDAWREIKSLEVRGDTVEVHVQLHFTLN

SEQ ID NO: 189 - protein, 130 aa, synthetic construct
GQKHTVDLTHHFHFRGNRVTEVRVHIYPSGGPPPSSPSGEADLSEEQIRQFLRRFYEALDSGDADTAASLFHPGVTIHLWDGVTFTSREEFREWFERLFSTSKDAWREIKSLEVRGDTVEVHVQLHFTLN

SEQ ID NO: 190 - protein, 130 aa, synthetic construct
GQKHTVDLTHHFHFRGNRVTEVRVHIYPAGGPPPSDPSGEASLSEEQIRQFLRRFYEALDSGDADTAASLFHPGVTIHLWDGVTFTSREEFREWFERLFSTSKDAWREIKSLEVRGDTVEVHVQLHFTLN

SEQ ID NO: 191 - protein, 130 aa, synthetic construct
GQKHTVDLTHHFHFRGNRVTEVRVHIYPAGGPPPSSPSGSASLSEEQIRQFLRRFYEALDSGDADTAASLFHPGVTIHLWDGVTFTSREEFREWFERLFSTSKDAWREIKSLEVRGDTVEVHVQLHFTLN

SEQ ID NO: 192 - protein, 130 aa, synthetic construct
GQKHTVDLTHHFHFRGNRVTEVRVHIYPAGGPPPSDPSGEADLSEEQIRQFLRRFYEALDSGDADTAASLFHPGVTIHLWDGVTFTSREEFREWFERLFSTSKDAWREIKSLEVRGDTVEVHVQLHFTLN

SEQ ID NO: 193 - protein, 130 aa, synthetic construct
GQKHTVDLTHHFHFRGNRVTEVRVHIYPAGGPPPSDPSGEAELSEEQIRQFLRRFYEALDSGDADTAASLFHPGVTIHLWDGVTFTSREEFREWFERLFSTSKDAWREIKSLEVRGDTVEVHVQLHFTLN

SEQ ID NO: 194 - protein, 130 aa, synthetic construct
GQKHTVDLTHHFHFRGNRVTEVRVHIYPEGGPPPSSPSGEASLSEEQIRQFLRRFYEALDSGDADTAASLFHPGVTIHLWDGVTFTSREEFREWFERLFSTSKDAWREIKSLEVRGDTVEVHVQLHFTLN

SEQ ID NO: 195 - protein, 130 aa, synthetic construct
GQKHTVDLTHHFHFRGNRVTEVRVHIYPAGGPPPSSPSGPASLSEEQIRQFLRRFYEALDSGDADTAASLFHPGVTIHLWDGVTFTSREEFREWFERLFSTSKDAWREIKSLEVRGDTVEVHVQLHFTLN

SEQ ID NO: 196 - protein, 130 aa, synthetic construct
GQKHTVDLTHHFHFRGNRVTEVRVHIYPAGGPPPSTPSGEASLSEEQIRQFLRRFYEALDSGDADTAASLFHPGVTIHLWDGVTFTSREEFREWFERLFSTSKDAWREIKSLEVRGDTVEVHVQLHFTLN

SEQ ID NO: 197 - protein, 130 aa, synthetic construct
GQKHTVDLTHHFHFRGNRVTEVRVHIYPSGGPPPSSPSGPASLSEEQIRQFLRRFYEALDSGDADTAASLFHPGVTIHLWDGVTFTSREEFREWFERLFSTSKDAWREIKSLEVRGDTVEVHVQLHFTLN

SEQ ID NO: 198 - protein, 131 aa, synthetic construct
GQKHTVDLTHHFHFRGNRVTEVRVHINPTTGEPPEPPPRLGPAMSEEQIRQFLRRFYEALDSGDADTAASLFHPGVTIHLWDGVTFTSREEFREWFERLFSTSKDAWREIKSLEVRGDTVEVHVQLHFTLN

SEQ ID NO: 199 - protein, 131 aa, synthetic construct
GQKHTVDLTHHFHFRGNRVTEVRVHIEPRDEPLDPESRLGSSSIPEEQIRQFLRRFYEALDSGDADTAASLFHPGVTIHLWDGVTFTSREEFREWFERLFSTSKDAWREIKSLEVRGDTVEVHVQLHFTLN

SEQ ID NO: 200 - protein, 131 aa, synthetic construct
GQKHTVDLTHHFHFRGNRVTEVRVHIEPRDEPRNPGSRLGPSPIPEEQIRQFLRRFYEALDSGDADTAASLFHPGVTIHLWDGVTFTSREEFREWFERLFSTSKDAWREIKSLEVRGDTVEVHVQLHFTLN

SEQ ID NO: 201 - protein, 131 aa, synthetic construct
GQKHTVDLTHHFHFRGNRVTEVRVHITPRDTPRNPSSSLGPSSIPEEQIRQFLRRFYEALDSGDADTAASLFHPGVTIHLWDGVTFTSREEFREWFERLFSTSKDAWREIKSLEVRGDTVEVHVQLHFTLN

SEQ ID NO: 202 - protein, 131 aa, synthetic construct
GQKHTVDLTHHFHFRGNRVTEVRVHIEPRSEPRDPGSRLGPSPIPEEQIRQFLRRFYEALDSGDADTAASLFHPGVTIHLWDGVTFTSREEFREWFERLFSTSKDAWREIKSLEVRGDTVEVHVQLHFTLN

SEQ ID NO: 203 - protein, 131 aa, synthetic construct
GQKHTVDLTHHFHFRGNRVTEVRVHIEPRSEPRHPGSRLGPSAIPEEQIRQFLRRFYEALDSGDADTAASLFHPGVTIHLWDGVTFTSREEFREWFERLFSTSKDAWREIKSLEVRGDTVEVHVQLHFTLN

SEQ ID NO: 204 - protein, 131 aa, synthetic construct
GQKHTVDLTHHFHFRGNRVTEVRVHIEPRSEPRHPESRLGPSAIPEEQIRQFLRRFYEALDSGDADTAASLFHPGVTIHLWDGVTFTSREEFREWFERLFSTSKDAWREIKSLEVRGDTVEVHVQLHFTLN

SEQ ID NO: 205 - protein, 131 aa, synthetic construct
GQKHTVDLTHHFHFRGNRVTEVRVHIEPRSEPRDPESRLGPSSIPEEQIRQFLRRFYEALDSGDADTAASLFHPGVTIHLWDGVTFTSREEFREWFERLFSTSKDAWREIKSLEVRGDTVEVHVQLHFTLN

SEQ ID NO: 206 - protein, 131 aa, synthetic construct
GQKHTVDLTHHFHFRGNRVTEVRVHIEPRSEPRNPESRLGPSAIPEEQIRQFLRRFYEALDSGDADTAASLFHPGVTIHLWDGVTFTSREEFREWFERLFSTSKDAWREIKSLEVRGDTVEVHVQLHFTLN

SEQ ID NO: 207 - protein, 131 aa, synthetic construct
GQKHTVDLTHHFHFRGNRVTEVRVHIEPRSEPRNPGSRLGPSEIPEEQIRQFLRRFYEALDSGDADTAASLFHPGVTIHLWDGVTFTSREEFREWFERLFSTSKDAWREIKSLEVRGDTVEVHVQLHFTLN

SEQ ID NO: 208 - protein, 131 aa, synthetic construct
GQKHTVDLTHHFHFRGNRVTEVRVHIEPRSEPLDPESRLGPSSIPEEQIRQFLRRFYEALDSGDADTAASLFHPGVTIHLWDGVTFTSREEFREWFERLFSTSKDAWREIKSLEVRGDTVEVHVQLHFTLN

SEQ ID NO: 209 - protein, 131 aa, synthetic construct
GQKHTVDLTHHFHFRGNRVTEVRVHIEPRDTPRDPESRLGPSSIPEEQIRQFLRRFYEALDSGDADTAASLFHPGVTIHLWDGVTFTSREEFREWFERLFSTSKDAWREIKSLEVRGDTVEVHVQLHFTLN

SEQ ID NO: 210 - protein, 131 aa, synthetic construct
GQKHTVDLTHHFHFRGNRVTEVRVHITPRSEPRHPESRLGPSPIPEEQIRQFLRRFYEALDSGDADTAASLFHPGVTIHLWDGVTFTSREEFREWFERLFSTSKDAWREIKSLEVRGDTVEVHVQLHFTLN

SEQ ID NO: 211 - protein, 131 aa, synthetic construct
GQKHTVDLTHHFHFRGNRVTEVRVHIEPRSEPRNPGSRLGPSAIPEEQIRQFLRRFYEALDSGDADTAASLFHPGVTIHLWDGVTFTSREEFREWFERLFSTSKDAWREIKSLEVRGDTVEVHVQLHFTLN

SEQ ID NO: 212 - protein, 131 aa, synthetic construct
GQKHTVDLTHHFHFRGNRVTEVRVHIEPRSEPRDPESRLGPSAIPEEQIRQFLRRFYEALDSGDADTAASLFHPGVTIHLWDGVTFTSREEFREWFERLFSTSKDAWREIKSLEVRGDTVEVHVQLHFTLN

SEQ ID NO: 213 - protein, 131 aa, synthetic construct
GQKHTVDLTHHFHFRGNRVTEVRVHIEPRSEPRNPGSRLGPSSIPEEQIRQFLRRFYEALDSGDADTAASLFHPGVTIHLWDGVTFTSREEFREWFERLFSTSKDAWREIKSLEVRGDTVEVHVQLHFTLN

SEQ ID NO: 214 - protein, 131 aa, synthetic construct
GQKHTVDLTHHFHFRGNRVTEVRVHITPRSEPRHPESRLGPSSIPEEQIRQFLRRFYEALDSGDADTAASLFHPGVTIHLWDGVTFTSREEFREWFERLFSTSKDAWREIKSLEVRGDTVEVHVQLHFTLN

SEQ ID NO: 215 - protein, 131 aa, synthetic construct
GQKHTVDLTHHFHFRGNRVTEVRVHIEPRSEPRHPESRLGPSPIPEEQIRQFLRRFYEALDSGDADTAASLFHPGVTIHLWDGVTFTSREEFREWFERLFSTSKDAWREIKSLEVRGDTVEVHVQLHFTLN

SEQ ID NO: 216 - protein, 132 aa, synthetic construct
GQKHTVDLTHHFHFRGNRVTEVRVHINPTTGEPPPPEKERLGPAMSEEQIRQFLRRFYEALDSGDADTAASLFHPGVTIHLWDGVTFTSREEFREWFERLFSTSKDAWREIKSLEVRGDTVEVHVQLHFTLN

SEQ ID NO: 217 - protein, 132 aa, synthetic construct
GQKHTVDLTHHFHFRGNRVTEVRVHITPRSEPETWRGERLGPSAIPEEQIRQFLRRFYEALDSGDADTAASLFHPGVTIHLWDGVTFTSREEFREWFERLFSTSKDAWREIKSLEVRGDTVEVHVQLHFTLN

SEQ ID NO: 218 - protein, 132 aa, synthetic construct
GQKHTVDLTHHFHFRGNRVTEVRVHIEPRSEPSTWRGERLGPSAIPEEQIRQFLRRFYEALDSGDADTAASLFHPGVTIHLWDGVTFTSREEFREWFERLFSTSKDAWREIKSLEVRGDTVEVHVQLHFTLN

SEQ ID NO: 219 - protein, 132 aa, synthetic construct
GQKHTVDLTHHFHFRGNRVTEVRVHITPRDEPEDWRGERLGPSAIPEEQIRQFLRRFYEALDSGDADTAASLFHPGVTIHLWDGVTFTSREEFREWFERLFSTSKDAWREIKSLEVRGDTVEVHVQLHFTLN

SEQ ID NO: 220 - protein, 132 aa, synthetic construct
GQKHTVDLTHHFHFRGNRVTEVRVHIAPRSEPSTWRGERLGPSAIPEEQIRQFLRRFYEALDSGDADTAASLFHPGVTIHLWDGVTFTSREEFREWFERLFSTSKDAWREIKSLEVRGDTVEVHVQLHFTLN

SEQ ID NO: 221 - protein, 132 aa, synthetic construct
GQKHTVDLTHHFHFRGNRVTEVRVHITPRSTPSTYRSERLGPSAIPEEQIRQFLRRFYEALDSGDADTAASLFHPGVTIHLWDGVTFTSREEFREWFERLFSTSKDAWREIKSLEVRGDTVEVHVQLHFTLN

SEQ ID NO: 222 - protein, 132 aa, synthetic construct
GQKHTVDLTHHFHFRGNRVTEVRVHIEPRSEPLDWRSERLGPSAIPEEQIRQFLRRFYEALDSGDADTAASLFHPGVTIHLWDGVTFTSREEFREWFERLFSTSKDAWREIKSLEVRGDTVEVHVQLHFTLN

SEQ ID NO: 223 - protein, 132 aa, synthetic construct
GQKHTVDLTHHFHFRGNRVTEVRVHITPRSTPSTWRGERLGPSAIPEEQIRQFLRRFYEALDSGDADTAASLFHPGVTIHLWDGVTFTSREEFREWFERLFSTSKDAWREIKSLEVRGDTVEVHVQLHFTLN

SEQ ID NO: 224 - protein, 132 aa, synthetic construct
GQKHTVDLTHHFHFRGNRVTEVRVHITPRSEPLTWRGERLGPSAIPEEQIRQFLRRFYEALDSGDADTAASLFHPGVTIHLWDGVTFTSREEFREWFERLFSTSKDAWREIKSLEVRGDTVEVHVQLHFTLN

SEQ ID NO: 225 - protein, 132 aa, synthetic construct
GQKHTVDLTHHFHFRGNRVTEVRVHITPRSTPTTWRGERLGPSAIPEEQIRQFLRRFYEALDSGDADTAASLFHPGVTIHLWDGVTFTSREEFREWFERLFSTSKDAWREIKSLEVRGDTVEVHVQLHFTLN

SEQ ID NO: 226 - protein, 132 aa, synthetic construct
GQKHTVDLTHHFHFRGNRVTEVRVHIEPRSEPLTYRGERLGPSAIPEEQIRQFLRRFYEALDSGDADTAASLFHPGVTIHLWDGVTFTSREEFREWFERLFSTSKDAWREIKSLEVRGDTVEVHVQLHFTLN

SEQ ID NO: 227 - protein, 132 aa, synthetic construct
GQKHTVDLTHHFHFRGNRVTEVRVHIEPRSEPLTWRSERLGPSAIPEEQIRQFLRRFYEALDSGDADTAASLFHPGVTIHLWDGVTFTSREEFREWFERLFSTSKDAWREIKSLEVRGDTVEVHVQLHFTLN

SEQ ID NO: 228 - protein, 132 aa, synthetic construct
GQKHTVDLTHHFHFRGNRVTEVRVHITPRSEPLDFRSERLGPSAIPEEQIRQFLRRFYEALDSGDADTAASLFHPGVTIHLWDGVTFTSREEFREWFERLFSTSKDAWREIKSLEVRGDTVEVHVQLHFTLN

SEQ ID NO: 229 - protein, 132 aa, synthetic construct
GQKHTVDLTHHFHFRGNRVTEVRVHIEPRDEPLTWRGERLGPSAIPEEQIRQFLRRFYEALDSGDADTAASLFHPGVTIHLWDGVTFTSREEFREWFERLFSTSKDAWREIKSLEVRGDTVEVHVQLHFTLN

SEQ ID NO: 230 - protein, 132 aa, synthetic construct
GQKHTVDLTHHFHFRGNRVTEVRVHIEPRSEPLTWRGERLGPSAIPEEQIRQFLRRFYEALDSGDADTAASLFHPGVTIHLWDGVTFTSREEFREWFERLFSTSKDAWREIKSLEVRGDTVEVHVQLHFTLN

SEQ ID NO: 231 - protein, 132 aa, synthetic construct
GQKHTVDLTHHFHFRGNRVTEVRVHIEPRSEPSDWRGERLGPSAIPEEQIRQFLRRFYEALDSGDADTAASLFHPGVTIHLWDGVTFTSREEFREWFERLFSTSKDAWREIKSLEVRGDTVEVHVQLHFTLN

SEQ ID NO: 232 - protein, 132 aa, synthetic construct
GQKHTVDLTHHFHFRGNRVTEVRVHIEPRSTPRTWRGERLGPSAIPEEQIRQFLRRFYEALDSGDADTAASLFHPGVTIHLWDGVTFTSREEFREWFERLFSTSKDAWREIKSLEVRGDTVEVHVQLHFTLN

SEQ ID NO: 233 - protein, 132 aa, synthetic construct
GQKHTVDLTHHFHFRGNRVTEVRVHITPRDTPLTWRGERLGPSAIPEEQIRQFLRRFYEALDSGDADTAASLFHPGVTIHLWDGVTFTSREEFREWFERLFSTSKDAWREIKSLEVRGDTVEVHVQLHFTLN

SEQ ID NO: 234 - protein, 132 aa, synthetic construct
GQKHTVDLTHHFHFRGNRVTEVRVHIEPRSTPTTFRSERLGPSAIPEEQIRQFLRRFYEALDSGDADTAASLFHPGVTIHLWDGVTFTSREEFREWFERLFSTSKDAWREIKSLEVRGDTVEVHVQLHFTLN

SEQ ID NO: 235 - protein, 132 aa, synthetic construct
GQKHTVDLTHHFHFRGNRVTEVRVHITPRDTPLDWRGERLGPSAIPEEQIRQFLRRFYEALDSGDADTAASLFHPGVTIHLWDGVTFTSREEFREWFERLFSTSKDAWREIKSLEVRGDTVEVHVQLHFTLN

SEQ ID NO: 236 - protein, 132 aa, synthetic construct
GQKHTVDLTHHFHFRGNRVTEVRVHIHPRSVPETWRSERLGPSTIPEEQIRQFLRRFYEALDSGDADTAASLFHPGVTIHLWDGVTFTSREEFREWFERLFSTSKDAWREIKSLEVRGDTVEVHVQLHFTLN

SEQ ID NO: 237 - protein, 133 aa, synthetic construct
GQKHTVDLTHHFHFRGNRVTEVRVHINPTTGEEPPGPERERLGGAMSEEQIRQFLRRFYEALDSGDADTAASLFHPGVTIHLWDGVTFTSREEFREWFERLFSTSKDAWREIKSLEVRGDTVEVHVQLHFTLN

SEQ ID NO: 238 - protein, 133 aa, synthetic construct
GQKHTVDLTHHFHFRGNRVTEVRVHITPRGDDPEGPRTERLGPSAIPEEQIRQFLRRFYEALDSGDADTAASLFHPGVTIHLWDGVTFTSREEFREWFERLFSTSKDAWREIKSLEVRGDTVEVHVQLHFTLN

SEQ ID NO: 239 - protein, 133 aa, synthetic construct
GQKHTVDLTHHFHFRGNRVTEVRVHIEPLGHDPEGPRTERLGPSAIPEEQIRQFLRRFYEALDSGDADTAASLFHPGVTIHLWDGVTFTSREEFREWFERLFSTSKDAWREIKSLEVRGDTVEVHVQLHFTLN

SEQ ID NO: 240 - protein, 133 aa, synthetic construct
GQKHTVDLTHHFHFRGNRVTEVRVHITPLGSDPEGPRTERLGPSAIPEEQIRQFLRRFYEALDSGDADTAASLFHPGVTIHLWDGVTFTSREEFREWFERLFSTSKDAWREIKSLEVRGDTVEVHVQLHFTLN

SEQ ID NO: 241 - protein, 133 aa, synthetic construct
GQKHTVDLTHHFHFRGNRVTEVRVHITPLGSDPEGERTERLGPSAIPEEQIRQFLRRFYEALDSGDADTAASLFHPGVTIHLWDGVTFTSREEFREWFERLFSTSKDAWREIKSLEVRGDTVEVHVQLHFTLN

SEQ ID NO: 242 - protein, 133 aa, synthetic construct
GQKHTVDLTHHFHFRGNRVTEVRVHITPLGSDPAGPRTERLGPSAIPEEQIRQFLRRFYEALDSGDADTAASLFHPGVTIHLWDGVTFTSREEFREWFERLFSTSKDAWREIKSLEVRGDTVEVHVQLHFTLN

SEQ ID NO: 243 - protein, 133 aa, synthetic construct
GQKHTVDLTHHFHFRGNRVTEVRVHIRPLGSDPAGPRTERLGPSAIPEEQIRQFLRRFYEALDSGDADTAASLFHPGVTIHLWDGVTFTSREEFREWFERLFSTSKDAWREIKSLEVRGDTVEVHVQLHFTLN

SEQ ID NO: 244 - protein, 133 aa, synthetic construct
GQKHTVDLTHHFHFRGNRVTEVRVHITPRGDDPAGPRTERLGPSAIPEEQIRQFLRRFYEALDSGDADTAASLFHPGVTIHLWDGVTFTSREEFREWFERLFSTSKDAWREIKSLEVRGDTVEVHVQLHFTLN

SEQ ID NO: 245 - protein, 133 aa, synthetic construct
GQKHTVDLTHHFHFRGNRVTEVRVHITPLGSDPAGERTERLGPSAIPEEQIRQFLRRFYEALDSGDADTAASLFHPGVTIHLWDGVTFTSREEFREWFERLFSTSKDAWREIKSLEVRGDTVEVHVQLHFTLN

SEQ ID NO: 246 - protein, 133 aa, synthetic construct
GQKHTVDLTHHFHFRGNRVTEVRVHITPLGDDPAGPRTERLGPSAIPEEQIRQFLRRFYEALDSGDADTAASLFHPGVTIHLWDGVTFTSREEFREWFERLFSTSKDAWREIKSLEVRGDTVEVHVQLHFTLN

SEQ ID NO: 247 - protein, 133 aa, synthetic construct
GQKHTVDLTHHFHFRGNRVTEVRVHIRPLGSDPEGPRTERLGPSAIPEEQIRQFLRRFYEALDSGDADTAASLFHPGVTIHLWDGVTFTSREEFREWFERLFSTSKDAWREIKSLEVRGDTVEVHVQLHFTLN

SEQ ID NO: 248 - protein, 133 aa, synthetic construct
GQKHTVDLTHHFHFRGNRVTEVRVHIRPLGEDPAGPRTERLGPSAIPEEQIRQFLRRFYEALDSGDADTAASLFHPGVTIHLWDGVTFTSREEFREWFERLFSTSKDAWREIKSLEVRGDTVEVHVQLHFTLN

SEQ ID NO: 249 - protein, 134 aa, synthetic construct
GQKHTVDLTHHFHFRGNRVTEVRVHINPTTGEPPPPGPETERFGPAMSEEQIRQFLRRFYEALDSGDADTAASLFHPGVTIHLWDGVTFTSREEFREWFERLFSTSKDAWREIKSLEVRGDTVEVHVQLHFTLN

SEQ ID NO: 250 - protein, 134 aa, synthetic construct
GQKHTVDLTHHFHFRGNRVTEVRVHIAPTGEEPEPPEFEERFGPSAIPEEQIRQFLRRFYEALDSGDADTAASLFHPGVTIHLWDGVTFTSREEFREWFERLFSTSKDAWREIKSLEVRGDTVEVHVQLHFTLN

SEQ ID NO: 251 - protein, 134 aa, synthetic construct
GQKHTVDLTHHFHFRGNRVTEVRVHITPTGEEPEPPAFEERFGPSTIPEEQIRQFLRRFYEALDSGDADTAASLFHPGVTIHLWDGVTFTSREEFREWFERLFSTSKDAWREIKSLEVRGDTVEVHVQLHFTLN

SEQ ID NO: 252 - protein, 134 aa, synthetic construct
GQKHTVDLTHHFHFRGNRVTEVRVHITPTGEEPEKPEFRERFGPSAIPEEQIRQFLRRFYEALDSGDADTAASLFHPGVTIHLWDGVTFTSREEFREWFERLFSTSKDAWREIKSLEVRGDTVEVHVQLHFTLN

SEQ ID NO: 253 - protein, 134 aa, synthetic construct
GQKHTVDLTHHFHFRGNRVTEVRVHIEPTGEEPEPPAFEERFGPSAIPEEQIRQFLRRFYEALDSGDADTAASLFHPGVTIHLWDGVTFTSREEFREWFERLFSTSKDAWREIKSLEVRGDTVEVHVQLHFTLN

SEQ ID NO: 254 - protein, 134 aa, synthetic construct
GQKHTVDLTHHFHFRGNRVTEVRVHITPTGEEPAAPAFEERFGPSAIPEEQIRQFLRRFYEALDSGDADTAASLFHPGVTIHLWDGVTFTSREEFREWFERLFSTSKDAWREIKSLEVRGDTVEVHVQLHFTLN

SEQ ID NO: 255 - protein, 134 aa, synthetic construct
GQKHTVDLTHHFHFRGNRVTEVRVHIEPTGEEPEPPEFRERFGPSAIPEEQIRQFLRRFYEALDSGDADTAASLFHPGVTIHLWDGVTFTSREEFREWFERLFSTSKDAWREIKSLEVRGDTVEVHVQLHFTLN

SEQ ID NO: 256 - protein, 134 aa, synthetic construct
GQKHTVDLTHHFHFRGNRVTEVRVHIEPTGEEPERPEFVERFGPSSIPEEQIRQFLRRFYEALDSGDADTAASLFHPGVTIHLWDGVTFTSREEFREWFERLFSTSKDAWREIKSLEVRGDTVEVHVQLHFTLN

SEQ ID NO: 257 - protein, 134 aa, synthetic construct
GQKHTVDLTHHFHFRGNRVTEVRVHIEPTGEEPAPPEFRERFGPSTIPEEQIRQFLRRFYEALDSGDADTAASLFHPGVTIHLWDGVTFTSREEFREWFERLFSTSKDAWREIKSLEVRGDTVEVHVQLHFTLN

SEQ ID NO: 258 - protein, 134 aa, synthetic construct
GQKHTVDLTHHFHFRGNRVTEVRVHITPTGEEPAPPEFRERFGPSAIPEEQIRQFLRRFYEALDSGDADTAASLFHPGVTIHLWDGVTFTSREEFREWFERLFSTSKDAWREIKSLEVRGDTVEVHVQLHFTLN

SEQ ID NO: 259 - protein, 134 aa, synthetic construct
GQKHTVDLTHHFHFRGNRVTEVRVHIRPTGEEPEPPEFRERFGPSAIPEEQIRQFLRRFYEALDSGDADTAASLFHPGVTIHLWDGVTFTSREEFREWFERLFSTSKDAWREIKSLEVRGDTVEVHVQLHFTLN

SEQ ID NO: 260 - protein, 134 aa, synthetic construct
GQKHTVDLTHHFHFRGNRVTEVRVHIAPTGEEPAPPEFVERFGPSAIPEEQIRQFLRRFYEALDSGDADTAASLFHPGVTIHLWDGVTFTSREEFREWFERLFSTSKDAWREIKSLEVRGDTVEVHVQLHFTLN

SEQ ID NO: 261 - protein, 134 aa, synthetic construct
GQKHTVDLTHHFHFRGNRVTEVRVHIEPTGEEPEAPAFEERFGPSTIPEEQIRQFLRRFYEALDSGDADTAASLFHPGVTIHLWDGVTFTSREEFREWFERLFSTSKDAWREIKSLEVRGDTVEVHVQLHFTLN

SEQ ID NO: 262 - protein, 134 aa, synthetic construct
GQKHTVDLTHHFHFRGNRVTEVRVHIEPTGEEPAAPAFEERFGPSAIPEEQIRQFLRRFYEALDSGDADTAASLFHPGVTIHLWDGVTFTSREEFREWFERLFSTSKDAWREIKSLEVRGDTVEVHVQLHFTLN

SEQ ID NO: 263 - protein, 134 aa, synthetic construct
GQKHTVDLTHHFHFRGNRVTEVRVHITPTGEEPEKPEFKETFGPSSIPEEQIRQFLRRFYEALDSGDADTAASLFHPGVTIHLWDGVTFTSREEFREWFERLFSTSKDAWREIKSLEVRGDTVEVHVQLHFTLN

SEQ ID NO: 264 - protein, 134 aa, synthetic construct
GQKHTVDLTHHFHFRGNRVTEVRVHIEPTGEEPEPPEFRERFGPSSIPEEQIRQFLRRFYEALDSGDADTAASLFHPGVTIHLWDGVTFTSREEFREWFERLFSTSKDAWREIKSLEVRGDTVEVHVQLHFTLN

SEQ ID NO: 265 - protein, 134 aa, synthetic construct
GQKHTVDLTHHFHFRGNRVTEVRVHIAPTGEEPAPPEFRERFGPSAIPEEQIRQFLRRFYEALDSGDADTAASLFHPGVTIHLWDGVTFTSREEFREWFERLFSTSKDAWREIKSLEVRGDTVEVHVQLHFTLN

SEQ ID NO: 266 - protein, 134 aa, synthetic construct
GQKHTVDLTHHFHFRGNRVTEVRVHIEPTGEEPAPPEFRERFGPSSIPEEQIRQFLRRFYEALDSGDADTAASLFHPGVTIHLWDGVTFTSREEFREWFERLFSTSKDAWREIKSLEVRGDTVEVHVQLHFTLN

SEQ ID NO: 267 - protein, 134 aa, synthetic construct
GQKHTVDLTHHFHFRGNRVTEVRVHIEPTGEEPAPPEFRERFGPSAIPEEQIRQFLRRFYEALDSGDADTAASLFHPGVTIHLWDGVTFTSREEFREWFERLFSTSKDAWREIKSLEVRGDTVEVHVQLHFTLN

SEQ ID NO: 268 - protein, 135 aa, synthetic construct
GQKHTVDLTHHFHFRGNRVTEVRVHINPTTDGGGPPLPPPPPPPGPPMSEEQIRQFLRRFYEALDSGDADTAASLFHPGVTIHLWDGVTFTSREEFREWFERLFSTSKDAWREIKSLEVRGDTVEVHVQLHFTLN

SEQ ID NO: 269 - protein, 135 aa, synthetic construct
GQKHTVDLTHHFHFRGNRVTEVRVHIRSLDDGTDLAPPLEPREGPASISEEQIRQFLRRFYEALDSGDADTAASLFHPGVTIHLWDGVTFTSREEFREWFERLFSTSKDAWREIKSLEVRGDTVEVHVQLHFTLN

SEQ ID NO: 270 - protein, 135 aa, synthetic construct
GQKHTVDLTHHFHFRGNRVTEVRVHIRPLDTGEDLSPPLEWREGPASISEEQIRQFLRRFYEALDSGDADTAASLFHPGVTIHLWDGVTFTSREEFREWFERLFSTSKDAWREIKSLEVRGDTVEVHVQLHFTLN

SEQ ID NO: 271 - protein, 135 aa, synthetic construct
GQKHTVDLTHHFHFRGNRVTEVRVHIRPLDDGADLAPPLVPREGPASISEEQIRQFLRRFYEALDSGDADTAASLFHPGVTIHLWDGVTFTSREEFREWFERLFSTSKDAWREIKSLEVRGDTVEVHVQLHFTLN

SEQ ID NO: 272 - protein, 135 aa, synthetic construct
GQKHTVDLTHHFHFRGNRVTEVRVHIRPLDTGESLAPPLEWREGPASVSEEQIRQFLRRFYEALDSGDADTAASLFHPGVTIHLWDGVTFTSREEFREWFERLFSTSKDAWREIKSLEVRGDTVEVHVQLHFTLN

SEQ ID NO: 273 - protein, 135 aa, synthetic construct
GQKHTVDLTHHFHFRGNRVTEVRVHIRPLDDGRSLAPPLVPREGPASISEEQIRQFLRRFYEALDSGDADTAASLFHPGVTIHLWDGVTFTSREEFREWFERLFSTSKDAWREIKSLEVRGDTVEVHVQLHFTLN

SEQ ID NO: 274 - protein, 135 aa, synthetic construct
GQKHTVDLTHHFHFRGNRVTEVRVHIRSLDDGESLAPPLEWREGGASVSEEQIRQFLRRFYEALDSGDADTAASLFHPGVTIHLWDGVTFTSREEFREWFERLFSTSKDAWREIKSLEVRGDTVEVHVQLHFTLN

SEQ ID NO: 275 - protein, 135 aa, synthetic construct
GQKHTVDLTHHFHFRGNRVTEVRVHIRPLDTGESLDPPLEPLEGGASISEEQIRQFLRRFYEALDSGDADTAASLFHPGVTIHLWDGVTFTSREEFREWFERLFSTSKDAWREIKSLEVRGDTVEVHVQLHFTLN

SEQ ID NO: 276 - protein, 135 aa, synthetic construct
GQKHTVDLTHHFHFRGNRVTEVRVHIRPLDTGESLAPPLEPREGGASISEEQIRQFLRRFYEALDSGDADTAASLFHPGVTIHLWDGVTFTSREEFREWFERLFSTSKDAWREIKSLEVRGDTVEVHVQLHFTLN

SEQ ID NO: 277 - protein, 135 aa, synthetic construct
GQKHTVDLTHHFHFRGNRVTEVRVHIRSLDDGESLDPPLEPLEGPASISEEQIRQFLRRFYEALDSGDADTAASLFHPGVTIHLWDGVTFTSREEFREWFERLFSTSKDAWREIKSLEVRGDTVEVHVQLHFTLN

SEQ ID NO: 278 - protein, 135 aa, synthetic construct
GQKHTVDLTHHFHFRGNRVTEVRVHIRPLDTGESLAPPLEWREGPASISEEQIRQFLRRFYEALDSGDADTAASLFHPGVTIHLWDGVTFTSREEFREWFERLFSTSKDAWREIKSLEVRGDTVEVHVQLHFTLN

SEQ ID NO: 279 - protein, 135 aa, synthetic construct
GQKHTVDLTHHFHFRGNRVTEVRVHIRSLDDGRDLAPPLEPLEGGASVSEEQIRQFLRRFYEALDSGDADTAASLFHPGVTIHLWDGVTFTSREEFREWFERLFSTSKDAWREIKSLEVRGDTVEVHVQLHFTLN

SEQ ID NO: 280 - protein, 135 aa, synthetic construct
GQKHTVDLTHHFHFRGNRVTEVRVHIRPLDSGESLAPPLEPLEGPASVSEEQIRQFLRRFYEALDSGDADTAASLFHPGVTIHLWDGVTFTSREEFREWFERLFSTSKDAWREIKSLEVRGDTVEVHVQLHFTLN

SEQ ID NO: 281 - protein, 135 aa, synthetic construct
GQKHTVDLTHHFHFRGNRVTEVRVHIRPLDTGESLSPPLVPREGPASVSEEQIRQFLRRFYEALDSGDADTAASLFHPGVTIHLWDGVTFTSREEFREWFERLFSTSKDAWREIKSLEVRGDTVEVHVQLHFTLN

SEQ ID NO: 282 - protein, 135 aa, synthetic construct
GQKHTVDLTHHFHFRGNRVTEVRVHIRPLDSGESLDPPLEPLEGEASVSEEQIRQFLRRFYEALDSGDADTAASLFHPGVTIHLWDGVTFTSREEFREWFERLFSTSKDAWREIKSLEVRGDTVEVHVQLHFTLN

SEQ ID NO: 283 - protein, 135 aa, synthetic construct
GQKHTVDLTHHFHFRGNRVTEVRVHIRPLDSGESLAPPLEWREGPASVSEEQIRQFLRRFYEALDSGDADTAASLFHPGVTIHLWDGVTFTSREEFREWFERLFSTSKDAWREIKSLEVRGDTVEVHVQLHFTLN

SEQ ID NO: 284 - protein, 135 aa, synthetic construct
GQKHTVDLTHHFHFRGNRVTEVRVHITPLDDGTSLSPPLTPLEGGASISEEQIRQFLRRFYEALDSGDADTAASLFHPGVTIHLWDGVTFTSREEFREWFERLFSTSKDAWREIKSLEVRGDTVEVHVQLHFTLN

SEQ ID NO: 285 - protein, 135 aa, synthetic construct
GQKHTVDLTHHFHFRGNRVTEVRVHIRSRDDGEALDPPLEPREGPASVSEEQIRQFLRRFYEALDSGDADTAASLFHPGVTIHLWDGVTFTSREEFREWFERLFSTSKDAWREIKSLEVRGDTVEVHVQLHFTLN

SEQ ID NO: 286 - protein, 135 aa, synthetic construct
GQKHTVDLTHHFHFRGNRVTEVRVHITPLDDGTSLAPPLTPLEGPASISEEQIRQFLRRFYEALDSGDADTAASLFHPGVTIHLWDGVTFTSREEFREWFERLFSTSKDAWREIKSLEVRGDTVEVHVQLHFTLN

SEQ ID NO: 287 - protein, 135 aa, synthetic construct
GQKHTVDLTHHFHFRGNRVTEVRVHIRSLDTGESLAPPLEPLEGPASVSEEQIRQFLRRFYEALDSGDADTAASLFHPGVTIHLWDGVTFTSREEFREWFERLFSTSKDAWREIKSLEVRGDTVEVHVQLHFTLN

SEQ ID NO: 288 - protein, 135 aa, synthetic construct
GQKHTVDLTHHFHFRGNRVTEVRVHIRDLDTGEDLAPPLEWREGGASISEEQIRQFLRRFYEALDSGDADTAASLFHPGVTIHLWDGVTFTSREEFREWFERLFSTSKDAWREIKSLEVRGDTVEVHVQLHFTLN

SEQ ID NO: 289 - protein, 136 aa, synthetic construct
GQKHTVDLTHHFHFRGNRVTEVRVHINPTTDGGPPPRRPELPPPPPGGMSEEQIRQFLRRFYEALDSGDADTAASLFHPGVTIHLWDGVTFTSREEFREWFERLFSTSKDAWREIKSLEVRGDTVEVHVQLHFTLN

SEQ ID NO: 290 - protein, 136 aa, synthetic construct
GQKHTVDLTHHFHFRGNRVTEVRVHIYPLDGGPPPDGTDDPPAGGSEPISEEQIRQFLRRFYEALDSGDADTAASLFHPGVTIHLWDGVTFTSREEFREWFERLFSTSKDAWREIKSLEVRGDTVEVHVQLHFTLN

SEQ ID NO: 291 - protein, 136 aa, synthetic construct
GQKHTVDLTHHFHFRGNRVTEVRVHIYPVDGGPPPDGTAEPPAAGDEPISEEQIRQFLRRFYEALDSGDADTAASLFHPGVTIHLWDGVTFTSREEFREWFERLFSTSKDAWREIKSLEVRGDTVEVHVQLHFTLN

SEQ ID NO: 292 - protein, 136 aa, synthetic construct
GQKHTVDLTHHFHFRGNRVTEVRVHIYPLDGGPPPDGTEAPPLPGSEPISEEQIRQFLRRFYEALDSGDADTAASLFHPGVTIHLWDGVTFTSREEFREWFERLFSTSKDAWREIKSLEVRGDTVEVHVQLHFTLN

SEQ ID NO: 293 - protein, 136 aa, synthetic construct
GQKHTVDLTHHFHFRGNRVTEVRVHIYPLDGGPPPDGTSAPPAPGDEPISEEQIRQFLRRFYEALDSGDADTAASLFHPGVTIHLWDGVTFTSREEFREWFERLFSTSKDAWREIKSLEVRGDTVEVHVQLHFTLN

SEQ ID NO: 294 - protein, 136 aa, synthetic construct
GQKHTVDLTHHFHFRGNRVTEVRVHIRPLDGGPPPDGTEAPPAPGDEPISEEQIRQFLRRFYEALDSGDADTAASLFHPGVTIHLWDGVTFTSREEFREWFERLFSTSKDAWREIKSLEVRGDTVEVHVQLHFTLN

SEQ ID NO: 295 - protein, 136 aa, synthetic construct
GQKHTVDLTHHFHFRGNRVTEVRVHIYPLDGGPPPDGTDAPPAGGSEPISEEQIRQFLRRFYEALDSGDADTAASLFHPGVTIHLWDGVTFTSREEFREWFERLFSTSKDAWREIKSLEVRGDTVEVHVQLHFTLN

SEQ ID NO: 296 - protein, 136 aa, synthetic construct
GQKHTVDLTHHFHFRGNRVTEVRVHIYPVDGGPPPDGTSAPPSGGSEPISEEQIRQFLRRFYEALDSGDADTAASLFHPGVTIHLWDGVTFTSREEFREWFERLFSTSKDAWREIKSLEVRGDTVEVHVQLHFTLN

SEQ ID NO: 297 - protein, 136 aa, synthetic construct
GQKHTVDLTHHFHFRGNRVTEVRVHIYPRDGGPPPDGREEPPAGGSEPISEEQIRQFLRRFYEALDSGDADTAASLFHPGVTIHLWDGVTFTSREEFREWFERLFSTSKDAWREIKSLEVRGDTVEVHVQLHFTLN

SEQ ID NO: 298 - protein, 136 aa, synthetic construct
GQKHTVDLTHHFHFRGNRVTEVRVHIYPLDGGPPPDGTEAPPAPGSEPISEEQIRQFLRRFYEALDSGDADTAASLFHPGVTIHLWDGVTFTSREEFREWFERLFSTSKDAWREIKSLEVRGDTVEVHVQLHFTLN

SEQ ID NO: 299 - protein, 136 aa, synthetic construct
GQKHTVDLTHHFHFRGNRVTEVRVHIYPLDGGPPPDGTSGPPSGGGEPISEEQIRQFLRRFYEALDSGDADTAASLFHPGVTIHLWDGVTFTSREEFREWFERLFSTSKDAWREIKSLEVRGDTVEVHVQLHFTLN

SEQ ID NO: 300 - protein, 136 aa, synthetic construct
GQKHTVDLTHHFHFRGNRVTEVRVHIYPVDGGPPPDGREEPPAGGSEPISEEQIRQFLRRFYEALDSGDADTAASLFHPGVTIHLWDGVTFTSREEFREWFERLFSTSKDAWREIKSLEVRGDTVEVHVQLHFTLN

SEQ ID NO: 301 - protein, 136 aa, synthetic construct
GQKHTVDLTHHFHFRGNRVTEVRVHIYPLDGGPPPDGTAAPPAGGSEPISEEQIRQFLRRFYEALDSGDADTAASLFHPGVTIHLWDGVTFTSREEFREWFERLFSTSKDAWREIKSLEVRGDTVEVHVQLHFTLN

SEQ ID NO: 302 - protein, 136 aa, synthetic construct
GQKHTVDLTHHFHFRGNRVTEVRVHIYPRDGGPPPNGTAEPPAPGGEPISEEQIRQFLRRFYEALDSGDADTAASLFHPGVTIHLWDGVTFTSREEFREWFERLFSTSKDAWREIKSLEVRGDTVEVHVQLHFTLN

SEQ ID NO: 303 - protein, 136 aa, synthetic construct
GQKHTVDLTHHFHFRGNRVTEVRVHIRPLDGGPPPDGTEDPPAGGSEPISEEQIRQFLRRFYEALDSGDADTAASLFHPGVTIHLWDGVTFTSREEFREWFERLFSTSKDAWREIKSLEVRGDTVEVHVQLHFTLN

SEQ ID NO: 304 - protein, 136 aa, synthetic construct
GQKHTVDLTHHFHFRGNRVTEVRVHIYPLDGGPPPNGTADPPAAGSEPISEEQIRQFLRRFYEALDSGDADTAASLFHPGVTIHLWDGVTFTSREEFREWFERLFSTSKDAWREIKSLEVRGDTVEVHVQLHFTLN

SEQ ID NO: 305 - protein, 136 aa, synthetic construct
GQKHTVDLTHHFHFRGNRVTEVRVHIYPVDGGPPPDGTAAPPAGGSEPISEEQIRQFLRRFYEALDSGDADTAASLFHPGVTIHLWDGVTFTSREEFREWFERLFSTSKDAWREIKSLEVRGDTVEVHVQLHFTLN

SEQ ID NO: 306 - protein, 136 aa, synthetic construct
GQKHTVDLTHHFHFRGNRVTEVRVHIYPLDGGPPPDGTEAWPAPGEEPISEEQIRQFLRRFYEALDSGDADTAASLFHPGVTIHLWDGVTFTSREEFREWFERLFSTSKDAWREIKSLEVRGDTVEVHVQLHFTLN

SEQ ID NO: 307 - protein, 136 aa, synthetic construct
GQKHTVDLTHHFHFRGNRVTEVRVHIYPLDGGPPPDGTAAPPAPGSEPISEEQIRQFLRRFYEALDSGDADTAASLFHPGVTIHLWDGVTFTSREEFREWFERLFSTSKDAWREIKSLEVRGDTVEVHVQLHFTLN

SEQ ID NO: 308 - protein, 136 aa, synthetic construct
GQKHTVDLTHHFHFRGNRVTEVRVHIYPVDGGPPPNGTAAPPAPGSEPISEEQIRQFLRRFYEALDSGDADTAASLFHPGVTIHLWDGVTFTSREEFREWFERLFSTSKDAWREIKSLEVRGDTVEVHVQLHFTLN

SEQ ID NO: 309 - protein, 136 aa, synthetic construct
GQKHTVDLTHHFHFRGNRVTEVRVHIYPLDGGPPPDGTEDPPAGGSEPISEEQIRQFLRRFYEALDSGDADTAASLFHPGVTIHLWDGVTFTSREEFREWFERLFSTSKDAWREIKSLEVRGDTVEVHVQLHFTLN

SEQ ID NO: 310 - protein, 137 aa, synthetic construct
GQKHTVDLTHHFHFRGNRVTEVRVHINPTTDGPEERLRELLELAEEGGPMSEEQIRQFLRRFYEALDSGDADTAASLFHPGVTIHLWDGVTFTSREEFREWFERLFSTSKDAWREIKSLEVRGDTVEVHVQLHFTLN

SEQ ID NO: 311 - protein, 137 aa, synthetic construct
GQKHTVDLTHHFHFRGNRVTEVRVHIYPQDDPGAHAGFRGRRGRGGGPPISEEQIRQFLRRFYEALDSGDADTAASLFHPGVTIHLWDGVTFTSREEFREWFERLFSTSKDAWREIKSLEVRGDTVEVHVQLHFTLN

SEQ ID NO: 312 - protein, 137 aa, synthetic construct
GQKHTVDLTHHFHFRGNRVTEVRVHIYPLDEPGCHAGFRGRRGAAGGPPISEEQIRQFLRRFYEALDSGDADTAASLFHPGVTIHLWDGVTFTSREEFREWFERLFSTSKDAWREIKSLEVRGDTVEVHVQLHFTLN

SEQ ID NO: 313 - protein, 137 aa, synthetic construct
GQKHTVDLTHHFHFRGNRVTEVRVHIHPKDCPGCHAGFAGRSGSGGGPPISEEQIRQFLRRFYEALDSGDADTAASLFHPGVTIHLWDGVTFTSREEFREWFERLFSTSKDAWREIKSLEVRGDTVEVHVQLHFTLN

SEQ ID NO: 314 - protein, 137 aa, synthetic construct
GQKHTVDLTHHFHFRGNRVTEVRVHIHPLDDPGCHAGFSGRRGSGGGPPISEEQIRQFLRRFYEALDSGDADTAASLFHPGVTIHLWDGVTFTSREEFREWFERLFSTSKDAWREIKSLEVRGDTVEVHVQLHFTLN

SEQ ID NO: 315 - protein, 137 aa, synthetic construct
GQKHTVDLTHHFHFRGNRVTEVRVHIHPLDDPGAHAGFSGRRGSGGGPPISEEQIRQFLRRFYEALDSGDADTAASLFHPGVTIHLWDGVTFTSREEFREWFERLFSTSKDAWREIKSLEVRGDTVEVHVQLHFTLN

SEQ ID NO: 316 - protein, 137 aa, synthetic construct
GQKHTVDLTHHFHFRGNRVTEVRVHIYPLDDPGLHAGHRGRRGAGGGPPISEEQIRQFLRRFYEALDSGDADTAASLFHPGVTIHLWDGVTFTSREEFREWFERLFSTSKDAWREIKSLEVRGDTVEVHVQLHFTLN

SEQ ID NO: 317 - protein, 137 aa, synthetic construct
GQKHTVDLTHHFHFRGNRVTEVRVHIHPLDDPGCHAGFHGESGRAGGPPISEEQIRQFLRRFYEALDSGDADTAASLFHPGVTIHLWDGVTFTSREEFREWFERLFSTSKDAWREIKSLEVRGDTVEVHVQLHFTLN

SEQ ID NO: 318 - protein, 137 aa, synthetic construct
GQKHTVDLTHHFHFRGNRVTEVRVHIFPRDDPGCHAGHRGRRGAGGGPPISEEQIRQFLRRFYEALDSGDADTAASLFHPGVTIHLWDGVTFTSREEFREWFERLFSTSKDAWREIKSLEVRGDTVEVHVQLHFTLN

SEQ ID NO: 319 - protein, 137 aa, synthetic construct
GQKHTVDLTHHFHFRGNRVTEVRVHIHPLDDPGCHAGFSGRRGRGGGPPISEEQIRQFLRRFYEALDSGDADTAASLFHPGVTIHLWDGVTFTSREEFREWFERLFSTSKDAWREIKSLEVRGDTVEVHVQLHFTLN

SEQ ID NO: 320 - protein, 137 aa, synthetic construct
GQKHTVDLTHHFHFRGNRVTEVRVHIHPLDDPGAHAGHSGRRGAGGGPPISEEQIRQFLRRFYEALDSGDADTAASLFHPGVTIHLWDGVTFTSREEFREWFERLFSTSKDAWREIKSLEVRGDTVEVHVQLHFTLN

SEQ ID NO: 321 - protein, 137 aa, synthetic construct
GQKHTVDLTHHFHFRGNRVTEVRVHIYPLDDPGCHAGFRGRRGSGGGPPISEEQIRQFLRRFYEALDSGDADTAASLFHPGVTIHLWDGVTFTSREEFREWFERLFSTSKDAWREIKSLEVRGDTVEVHVQLHFTLN

SEQ ID NO: 322 - protein, 137 aa, synthetic construct
GQKHTVDLTHHFHFRGNRVTEVRVHIHPLDDPGCHAGFHGEAALGGGPPISEEQIRQFLRRFYEALDSGDADTAASLFHPGVTIHLWDGVTFTSREEFREWFERLFSTSKDAWREIKSLEVRGDTVEVHVQLHFTLN

SEQ ID NO: 323 - protein, 137 aa, synthetic construct
GQKHTVDLTHHFHFRGNRVTEVRVHIYPKDDPGCHAGHRGRWGSGGGPPISEEQIRQFLRRFYEALDSGDADTAASLFHPGVTIHLWDGVTFTSREEFREWFERLFSTSKDAWREIKSLEVRGDTVEVHVQLHFTLN

SEQ ID NO: 324 - protein, 137 aa, synthetic construct
GQKHTVDLTHHFHFRGNRVTEVRVHIYPLDDPGCHAGFRGARGSGGGPPISEEQIRQFLRRFYEALDSGDADTAASLFHPGVTIHLWDGVTFTSREEFREWFERLFSTSKDAWREIKSLEVRGDTVEVHVQLHFTLN

SEQ ID NO: 325 - protein, 137 aa, synthetic construct
GQKHTVDLTHHFHFRGNRVTEVRVHIHPLDDPGAHAGFAGAAGAGGGPPISEEQIRQFLRRFYEALDSGDADTAASLFHPGVTIHLWDGVTFTSREEFREWFERLFSTSKDAWREIKSLEVRGDTVEVHVQLHFTLN

SEQ ID NO: 326 - protein, 137 aa, synthetic construct
GQKHTVDLTHHFHFRGNRVTEVRVHIHPLDDPGAHAGFSGRSGSGGGPPISEEQIRQFLRRFYEALDSGDADTAASLFHPGVTIHLWDGVTFTSREEFREWFERLFSTSKDAWREIKSLEVRGDTVEVHVQLHFTLN

SEQ ID NO: 327 - protein, 137 aa, synthetic construct
GQKHTVDLTHHFHFRGNRVTEVRVHIHPLDDPGCHAGFSGRSGSGGGPPISEEQIRQFLRRFYEALDSGDADTAASLFHPGVTIHLWDGVTFTSREEFREWFERLFSTSKDAWREIKSLEVRGDTVEVHVQLHFTLN

SEQ ID NO: 328 - protein, 137 aa, synthetic construct
GQKHTVDLTHHFHFRGNRVTEVRVHIHPLDDPGAHAGFAGRRGAAGGPPISEEQIRQFLRRFYEALDSGDADTAASLFHPGVTIHLWDGVTFTSREEFREWFERLFSTSKDAWREIKSLEVRGDTVEVHVQLHFTLN

SEQ ID NO: 329 - protein, 138 aa, synthetic construct
GQKHTVDLTHHFHFRGNRVTEVRVHINPTTDGPPELLRRELEELEEPPGGMSEEQIRQFLRRFYEALDSGDADTAASLFHPGVTIHLWDGVTFTSREEFREWFERLFSTSKDAWREIKSLEVRGDTVEVHVQLHFTLN

SEQ ID NO: 330 - protein, 138 aa, synthetic construct
GQKHTVDLTHHFHFRGNRVTEVRVHIRPLDDPPPLFAAGLGERGRPGDEPISEEQIRQFLRRFYEALDSGDADTAASLFHPGVTIHLWDGVTFTSREEFREWFERLFSTSKDAWREIKSLEVRGDTVEVHVQLHFTLN

SEQ ID NO: 331 - protein, 138 aa, synthetic construct
GQKHTVDLTHHFHFRGNRVTEVRVHIRPLDGLPPLFGQHLGESGAPGDEPISEEQIRQFLRRFYEALDSGDADTAASLFHPGVTIHLWDGVTFTSREEFREWFERLFSTSKDAWREIKSLEVRGDTVEVHVQLHFTLN

SEQ ID NO: 332 - protein, 138 aa, synthetic construct
GQKHTVDLTHHFHFRGNRVTEVRVHIYPLDGLPELFDRGRGERGRPGDEPISEEQIRQFLRRFYEALDSGDADTAASLFHPGVTIHLWDGVTFTSREEFREWFERLFSTSKDAWREIKSLEVRGDTVEVHVQLHFTLN

SEQ ID NO: 333 - protein, 138 aa, synthetic construct
GQKHTVDLTHHFHFRGNRVTEVRVHIRPRDGPPPLFGAGLGERGAPGDEPISEEQIRQFLRRFYEALDSGDADTAASLFHPGVTIHLWDGVTFTSREEFREWFERLFSTSKDAWREIKSLEVRGDTVEVHVQLHFTLN

SEQ ID NO: 334 - protein, 138 aa, synthetic construct
GQKHTVDLTHHFHFRGNRVTEVRVHIRPLDGLPEAFGRGLGERGAPGDEPISEEQIRQFLRRFYEALDSGDADTAASLFHPGVTIHLWDGVTFTSREEFREWFERLFSTSKDAWREIKSLEVRGDTVEVHVQLHFTLN

SEQ ID NO: 335 - protein, 138 aa, synthetic construct
GQKHTVDLTHHFHFRGNRVTEVRVHIRPLDGPPELFGRGLGRRGRPGDEPISEEQIRQFLRRFYEALDSGDADTAASLFHPGVTIHLWDGVTFTSREEFREWFERLFSTSKDAWREIKSLEVRGDTVEVHVQLHFTLN

SEQ ID NO: 336 - protein, 138 aa, synthetic construct
GQKHTVDLTHHFHFRGNRVTEVRVHIRPLDGLPELFGRGLGERGDPGDEPISEEQIRQFLRRFYEALDSGDADTAASLFHPGVTIHLWDGVTFTSREEFREWFERLFSTSKDAWREIKSLEVRGDTVEVHVQLHFTLN

SEQ ID NO: 337 - protein, 138 aa, synthetic construct
GQKHTVDLTHHFHFRGNRVTEVRVHIRPLDGPPALFGEGLGEEGAPGDEPISEEQIRQFLRRFYEALDSGDADTAASLFHPGVTIHLWDGVTFTSREEFREWFERLFSTSKDAWREIKSLEVRGDTVEVHVQLHFTLN

SEQ ID NO: 338 - protein, 138 aa, synthetic construct
GQKHTVDLTHHFHFRGNRVTEVRVHIRPLDGLPERFGKGLGERDEPGDEPISEEQIRQFLRRFYEALDSGDADTAASLFHPGVTIHLWDGVTFTSREEFREWFERLFSTSKDAWREIKSLEVRGDTVEVHVQLHFTLN

SEQ ID NO: 339 - protein, 138 aa, synthetic construct
GQKHTVDLTHHFHFRGNRVTEVRVHIRPLDGPPPLFEAGLGERGRPGSEPISEEQIRQFLRRFYEALDSGDADTAASLFHPGVTIHLWDGVTFTSREEFREWFERLFSTSKDAWREIKSLEVRGDTVEVHVQLHFTLN

SEQ ID NO: 340 - protein, 138 aa, synthetic construct
GQKHTVDLTHHFHFRGNRVTEVRVHIRPLDGLPEVFGRGLGERGDPGDEPISEEQIRQFLRRFYEALDSGDADTAASLFHPGVTIHLWDGVTFTSREEFREWFERLFSTSKDAWREIKSLEVRGDTVEVHVQLHFTLN

SEQ ID NO: 341 - protein, 138 aa, synthetic construct
GQKHTVDLTHHFHFRGNRVTEVRVHIRPLDGPPELFGRGLGERGRPGTEPISEEQIRQFLRRFYEALDSGDADTAASLFHPGVTIHLWDGVTFTSREEFREWFERLFSTSKDAWREIKSLEVRGDTVEVHVQLHFTLN

SEQ ID NO: 342 - protein, 138 aa, synthetic construct
GQKHTVDLTHHFHFRGNRVTEVRVHIHPLDGLPPLFGAGLGERGDPGDEPISEEQIRQFLRRFYEALDSGDADTAASLFHPGVTIHLWDGVTFTSREEFREWFERLFSTSKDAWREIKSLEVRGDTVEVHVQLHFTLN

SEQ ID NO: 343 - protein, 138 aa, synthetic construct
GQKHTVDLTHHFHFRGNRVTEVRVHIRPLDGPPELFEKGLGERDRPGDEPISEEQIRQFLRRFYEALDSGDADTAASLFHPGVTIHLWDGVTFTSREEFREWFERLFSTSKDAWREIKSLEVRGDTVEVHVQLHFTLN

SEQ ID NO: 344 - protein, 138 aa, synthetic construct
GQKHTVDLTHHFHFRGNRVTEVRVHIRPRDGLPELFGKGLGASGTPGDEPISEEQIRQFLRRFYEALDSGDADTAASLFHPGVTIHLWDGVTFTSREEFREWFERLFSTSKDAWREIKSLEVRGDTVEVHVQLHFTLN

SEQ ID NO: 345 - protein, 138 aa, synthetic construct
GQKHTVDLTHHFHFRGNRVTEVRVHIRPLDGLPELFGSGLGERGAPGDEPISEEQIRQFLRRFYEALDSGDADTAASLFHPGVTIHLWDGVTFTSREEFREWFERLFSTSKDAWREIKSLEVRGDTVEVHVQLHFTLN

SEQ ID NO: 346 - protein, 138 aa, synthetic construct
GQKHTVDLTHHFHFRGNRVTEVRVHIRPRDGPPPLFAEGLGARDDPGDEPISEEQIRQFLRRFYEALDSGDADTAASLFHPGVTIHLWDGVTFTSREEFREWFERLFSTSKDAWREIKSLEVRGDTVEVHVQLHFTLN

SEQ ID NO: 347 - protein, 138 aa, synthetic construct
GQKHTVDLTHHFHFRGNRVTEVRVHIRPLDGPPDLFGRGLGERGSPGTEPISEEQIRQFLRRFYEALDSGDADTAASLFHPGVTIHLWDGVTFTSREEFREWFERLFSTSKDAWREIKSLEVRGDTVEVHVQLHFTLN

SEQ ID NO: 348 - protein, 138 aa, synthetic construct
GQKHTVDLTHHFHFRGNRVTEVRVHIRPLDGLPELFGKGLGRRGAPGDEPISEEQIRQFLRRFYEALDSGDADTAASLFHPGVTIHLWDGVTFTSREEFREWFERLFSTSKDAWREIKSLEVRGDTVEVHVQLHFTLN

SEQ ID NO: 349 - protein, 138 aa, synthetic construct
GQKHTVDLTHHFHFRGNRVTEVRVHIRPLDGPPPLFGAGLGERGAPGDEPISEEQIRQFLRRFYEALDSGDADTAASLFHPGVTIHLWDGVTFTSREEFREWFERLFSTSKDAWREIKSLEVRGDTVEVHVQLHFTLN

SEQ ID NO: 350 - protein, 139 aa, synthetic construct
GQKHTVDLTHHFHFRGNRVTEVRVHINPTTDGPPELLRRLLEELLPPPGGPMSEEQIRQFLRRFYEALDSGDADTAASLFHPGVTIHLWDGVTFTSREEFREWFERLFSTSKDAWREIKSLEVRGDTVEVHVQLHFTLN

SEQ ID NO: 351 - protein, 139 aa, synthetic construct
GQKHTVDLTHHFHFRGNRVTEVRVHIAPVDGPPALAARSGHVGRPPPGGPPISEEQIRQFLRRFYEALDSGDADTAASLFHPGVTIHLWDGVTFTSREEFREWFERLFSTSKDAWREIKSLEVRGDTVEVHVQLHFTLN

SEQ ID NO: 352 - protein, 139 aa, synthetic construct
GQKHTVDLTHHFHFRGNRVTEVRVHITPLDGPQSLADRSGRVGRPPSGGPPISEEQIRQFLRRFYEALDSGDADTAASLFHPGVTIHLWDGVTFTSREEFREWFERLFSTSKDAWREIKSLEVRGDTVEVHVQLHFTLN

SEQ ID NO: 353 - protein, 139 aa, synthetic construct
GQKHTVDLTHHFHFRGNRVTEVRVHIRPIDGPQSLVDRSGDVGRPPSGGPPISEEQIRQFLRRFYEALDSGDADTAASLFHPGVTIHLWDGVTFTSREEFREWFERLFSTSKDAWREIKSLEVRGDTVEVHVQLHFTLN

SEQ ID NO: 354 - protein, 139 aa, synthetic construct
GQKHTVDLTHHFHFRGNRVTEVRVHIRPIDGPAALTAASGDVGRPPSGGPPISEEQIRQFLRRFYEALDSGDADTAASLFHPGVTIHLWDGVTFTSREEFREWFERLFSTSKDAWREIKSLEVRGDTVEVHVQLHFTLN

SEQ ID NO: 355 - protein, 139 aa, synthetic construct
GQKHTVDLTHHFHFRGNRVTEVRVHIRPLDGPQSLADRSGDVGRPPSGGPPISEEQIRQFLRRFYEALDSGDADTAASLFHPGVTIHLWDGVTFTSREEFREWFERLFSTSKDAWREIKSLEVRGDTVEVHVQLHFTLN

SEQ ID NO: 356 - protein, 139 aa, synthetic construct
GQKHTVDLTHHFHFRGNRVTEVRVHIRPVDGPAALAARSGHVGRPPPGGPPISEEQIRQFLRRFYEALDSGDADTAASLFHPGVTIHLWDGVTFTSREEFREWFERLFSTSKDAWREIKSLEVRGDTVEVHVQLHFTLN

SEQ ID NO: 357 - protein, 139 aa, synthetic construct
GQKHTVDLTHHFHFRGNRVTEVRVHITPVDGPPALAARSGAVGRPPSGGPPISEEQIRQFLRRFYEALDSGDADTAASLFHPGVTIHLWDGVTFTSREEFREWFERLFSTSKDAWREIKSLEVRGDTVEVHVQLHFTLN

SEQ ID NO: 358 - protein, 139 aa, synthetic construct
GQKHTVDLTHHFHFRGNRVTEVRVHIRPRDGPPALAARSGRVGRPPPGGPPISEEQIRQFLRRFYEALDSGDADTAASLFHPGVTIHLWDGVTFTSREEFREWFERLFSTSKDAWREIKSLEVRGDTVEVHVQLHFTLN

SEQ ID NO: 359 - protein, 139 aa, synthetic construct
GQKHTVDLTHHFHFRGNRVTEVRVHIRPIDGPASLAARSGRVGRPPSGGPPISEEQIRQFLRRFYEALDSGDADTAASLFHPGVTIHLWDGVTFTSREEFREWFERLFSTSKDAWREIKSLEVRGDTVEVHVQLHFTLN

SEQ ID NO: 360 - protein, 139 aa, synthetic construct
GQKHTVDLTHHFHFRGNRVTEVRVHIRPVDGPASLTARSGGVGRPPPGGPPISEEQIRQFLRRFYEALDSGDADTAASLFHPGVTIHLWDGVTFTSREEFREWFERLFSTSKDAWREIKSLEVRGDTVEVHVQLHFTLN

SEQ ID NO: 361 - protein, 139 aa, synthetic construct
GQKHTVDLTHHFHFRGNRVTEVRVHIRPLDGPQSLTDRSGDVGRPPSGGPPISEEQIRQFLRRFYEALDSGDADTAASLFHPGVTIHLWDGVTFTSREEFREWFERLFSTSKDAWREIKSLEVRGDTVEVHVQLHFTLN

SEQ ID NO: 362 - protein, 139 aa, synthetic construct
GQKHTVDLTHHFHFRGNRVTEVRVHIAPRDGPAALAARSGAVGRPPSGGPPISEEQIRQFLRRFYEALDSGDADTAASLFHPGVTIHLWDGVTFTSREEFREWFERLFSTSKDAWREIKSLEVRGDTVEVHVQLHFTLN

SEQ ID NO: 363 - protein, 139 aa, synthetic construct
GQKHTVDLTHHFHFRGNRVTEVRVHITPLDGPPALAARSGRVGRPPSGGPPISEEQIRQFLRRFYEALDSGDADTAASLFHPGVTIHLWDGVTFTSREEFREWFERLFSTSKDAWREIKSLEVRGDTVEVHVQLHFTLN

SEQ ID NO: 364 - protein, 139 aa, synthetic construct
GQKHTVDLTHHFHFRGNRVTEVRVHIRPIDGPPALTARSGNIGRPPSGGPPISEEQIRQFLRRFYEALDSGDADTAASLFHPGVTIHLWDGVTFTSREEFREWFERLFSTSKDAWREIKSLEVRGDTVEVHVQLHFTLN

SEQ ID NO: 365 - protein, 139 aa, synthetic construct
GQKHTVDLTHHFHFRGNRVTEVRVHITPRDGPAALAARSGGVGRPPPGGPPISEEQIRQFLRRFYEALDSGDADTAASLFHPGVTIHLWDGVTFTSREEFREWFERLFSTSKDAWREIKSLEVRGDTVEVHVQLHFTLN

SEQ ID NO: 366 - protein, 139 aa, synthetic construct
GQKHTVDLTHHFHFRGNRVTEVRVHIRPLDGPASLAARSGDVGRPPPGGPPISEEQIRQFLRRFYEALDSGDADTAASLFHPGVTIHLWDGVTFTSREEFREWFERLFSTSKDAWREIKSLEVRGDTVEVHVQLHFTLN

SEQ ID NO: 367 - protein, 139 aa, synthetic construct
GQKHTVDLTHHFHFRGNRVTEVRVHIRPLDGPAALAAASGAVGRPPEGGPPISEEQIRQFLRRFYEALDSGDADTAASLFHPGVTIHLWDGVTFTSREEFREWFERLFSTSKDAWREIKSLEVRGDTVEVHVQLHFTLN

SEQ ID NO: 368 - protein, 139 aa, synthetic construct
GQKHTVDLTHHFHFRGNRVTEVRVHITPRDGPPALAARSGAIGRPPEGGPPISEEQIRQFLRRFYEALDSGDADTAASLFHPGVTIHLWDGVTFTSREEFREWFERLFSTSKDAWREIKSLEVRGDTVEVHVQLHFTLN

SEQ ID NO: 369 - protein, 139 aa, synthetic construct
GQKHTVDLTHHFHFRGNRVTEVRVHIRPLDGPQSLTDRSGRVGRPPSGGPPISEEQIRQFLRRFYEALDSGDADTAASLFHPGVTIHLWDGVTFTSREEFREWFERLFSTSKDAWREIKSLEVRGDTVEVHVQLHFTLN

SEQ ID NO: 370 - protein, 139 aa, synthetic construct
GQKHTVDLTHHFHFRGNRVTEVRVHITPIDGPKALTDRSGKVGRPPSGGPPISEEQIRQFLRRFYEALDSGDADTAASLFHPGVTIHLWDGVTFTSREEFREWFERLFSTSKDAWREIKSLEVRGDTVEVHVQLHFTLN

SEQ ID NO: 371 - protein, 140 aa, synthetic construct
GQKHTVDLTHHFHFRGNRVTEVRVHINPTTDGEEELLLLEELLELLEPPGGPMSEEQIRQFLRRFYEALDSGDADTAASLFHPGVTIHLWDGVTFTSREEFREWFERLFSTSKDAWREIKSLEVRGDTVEVHVQLHFTLN

SEQ ID NO: 372 - protein, 140 aa, synthetic construct
GQKHTVDLTHHFHFRGNRVTEVRVHIYPKDGEVLKKFLPFQDRLRTDLGGPPISEEQIRQFLRRFYEALDSGDADTAASLFHPGVTIHLWDGVTFTSREEFREWFERLFSTSKDAWREIKSLEVRGDTVEVHVQLHFTLN

SEQ ID NO: 373 - protein, 140 aa, synthetic construct
GQKHTVDLTHHFHFRGNRVTEVRVHIYPKDGEVLKKFLPFQDTRRLDLGGPGISEEQIRQFLRRFYEALDSGDADTAASLFHPGVTIHLWDGVTFTSREEFREWFERLFSTSKDAWREIKSLEVRGDTVEVHVQLHFTLN

SEQ ID NO: 374 - protein, 140 aa, synthetic construct
GQKHTVDLTHHFHFRGNRVTEVRVHIYPRDGEVLKKFLPFQDTRRSDLGGPGISEEQIRQFLRRFYEALDSGDADTAASLFHPGVTIHLWDGVTFTSREEFREWFERLFSTSKDAWREIKSLEVRGDTVEVHVQLHFTLN

SEQ ID NO: 375 - protein, 140 aa, synthetic construct
GQKHTVDLTHHFHFRGNRVTEVRVHIYPLDGEVLEKFLPFQDTLRLDLGGPPISEEQIRQFLRRFYEALDSGDADTAASLFHPGVTIHLWDGVTFTSREEFREWFERLFSTSKDAWREIKSLEVRGDTVEVHVQLHFTLN

SEQ ID NO: 376 - protein, 140 aa, synthetic construct
GQKHTVDLTHHFHFRGNRVTEVRVHIYPKDGEVLKSFLPNQDTRRLDLGGPPISEEQIRQFLRRFYEALDSGDADTAASLFHPGVTIHLWDGVTFTSREEFREWFERLFSTSKDAWREIKSLEVRGDTVEVHVQLHFTLN

SEQ ID NO: 377 - protein, 140 aa, synthetic construct
GQKHTVDLTHHFHFRGNRVTEVRVHIYPKDGEVLEKFLPFQGTRRSDLGGPPISEEQIRQFLRRFYEALDSGDADTAASLFHPGVTIHLWDGVTFTSREEFREWFERLFSTSKDAWREIKSLEVRGDTVEVHVQLHFTLN

SEQ ID NO: 378 - protein, 140 aa, synthetic construct
GQKHTVDLTHHFHFRGNRVTEVRVHIYPKDGEVLKKFLPHQDTRRSDLGGPGISEEQIRQFLRRFYEALDSGDADTAASLFHPGVTIHLWDGVTFTSREEFREWFERLFSTSKDAWREIKSLEVRGDTVEVHVQLHFTLN

SEQ ID NO: 379 - protein, 140 aa, synthetic construct
GQKHTVDLTHHFHFRGNRVTEVRVHIYPLDGEVLKKFLPHQGTRRSDPGGPPISEEQIRQFLRRFYEALDSGDADTAASLFHPGVTIHLWDGVTFTSREEFREWFERLFSTSKDAWREIKSLEVRGDTVEVHVQLHFTLN

SEQ ID NO: 380 - protein, 140 aa, synthetic construct
GQKHTVDLTHHFHFRGNRVTEVRVHIFPKDGEVLKKFLPNQGTRRLDLGGPPISEEQIRQFLRRFYEALDSGDADTAASLFHPGVTIHLWDGVTFTSREEFREWFERLFSTSKDAWREIKSLEVRGDTVEVHVQLHFTLN

SEQ ID NO: 381 - protein, 140 aa, synthetic construct
GQKHTVDLTHHFHFRGNRVTEVRVHIYPLDGEVLKKFLPHQDTLRLDLGGPPISEEQIRQFLRRFYEALDSGDADTAASLFHPGVTIHLWDGVTFTSREEFREWFERLFSTSKDAWREIKSLEVRGDTVEVHVQLHFTLN

SEQ ID NO: 382 - protein, 140 aa, synthetic construct
GQKHTVDLTHHFHFRGNRVTEVRVHIYPRDGGVLKAFLPHQDTRRLDLGGPGISEEQIRQFLRRFYEALDSGDADTAASLFHPGVTIHLWDGVTFTSREEFREWFERLFSTSKDAWREIKSLEVRGDTVEVHVQLHFTLN

SEQ ID NO: 383 - protein, 140 aa, synthetic construct
GQKHTVDLTHHFHFRGNRVTEVRVHIYPKDGEVLKKFLPFQDRRRLDLGGPPISEEQIRQFLRRFYEALDSGDADTAASLFHPGVTIHLWDGVTFTSREEFREWFERLFSTSKDAWREIKSLEVRGDTVEVHVQLHFTLN

SEQ ID NO: 384 - protein, 140 aa, synthetic construct
GQKHTVDLTHHFHFRGNRVTEVRVHIYPKDGDVLKKFLPFQDTRRLDLGGPGISEEQIRQFLRRFYEALDSGDADTAASLFHPGVTIHLWDGVTFTSREEFREWFERLFSTSKDAWREIKSLEVRGDTVEVHVQLHFTLN

SEQ ID NO: 385 - protein, 140 aa, synthetic construct
GQKHTVDLTHHFHFRGNRVTEVRVHIYPLDGDVLKKFLPFQDRLRLDLGGPPISEEQIRQFLRRFYEALDSGDADTAASLFHPGVTIHLWDGVTFTSREEFREWFERLFSTSKDAWREIKSLEVRGDTVEVHVQLHFTLN

SEQ ID NO: 386 - protein, 140 aa, synthetic construct
GQKHTVDLTHHFHFRGNRVTEVRVHIYPRDGEVLKAFLPHQGTRRTDLGGPPISEEQIRQFLRRFYEALDSGDADTAASLFHPGVTIHLWDGVTFTSREEFREWFERLFSTSKDAWREIKSLEVRGDTVEVHVQLHFTLN

SEQ ID NO: 387 - protein, 140 aa, synthetic construct
GQKHTVDLTHHFHFRGNRVTEVRVHIYPKDGEVLKKFLPHQDTRRLDLGGPGISEEQIRQFLRRFYEALDSGDADTAASLFHPGVTIHLWDGVTFTSREEFREWFERLFSTSKDAWREIKSLEVRGDTVEVHVQLHFTLN

SEQ ID NO: 388 - protein, 140 aa, synthetic construct
GQKHTVDLTHHFHFRGNRVTEVRVHIYPKDGEVLKKFLPFQDTRRTDLGGPPISEEQIRQFLRRFYEALDSGDADTAASLFHPGVTIHLWDGVTFTSREEFREWFERLFSTSKDAWREIKSLEVRGDTVEVHVQLHFTLN

SEQ ID NO: 389 - protein, 140 aa, synthetic construct
GQKHTVDLTHHFHFRGNRVTEVRVHIYPKDGEVLKKFLPHQDTLRTDLGGPPISEEQIRQFLRRFYEALDSGDADTAASLFHPGVTIHLWDGVTFTSREEFREWFERLFSTSKDAWREIKSLEVRGDTVEVHVQLHFTLN

SEQ ID NO: 390 - protein, 140 aa, synthetic construct
GQKHTVDLTHHFHFRGNRVTEVRVHIYPRDGEVLEKFLPFQDRRRSDLGGPPISEEQIRQFLRRFYEALDSGDADTAASLFHPGVTIHLWDGVTFTSREEFREWFERLFSTSKDAWREIKSLEVRGDTVEVHVQLHFTLN

SEQ ID NO: 391 - protein, 140 aa, synthetic construct
GQKHTVDLTHHFHFRGNRVTEVRVHIYPLDGEVLKKFLPFQNTRRSDLGGPPISEEQIRQFLRRFYEALDSGDADTAASLFHPGVTIHLWDGVTFTSREEFREWFERLFSTSKDAWREIKSLEVRGDTVEVHVQLHFTLN

SEQ ID NO: 392 - protein, 141 aa, synthetic construct
GQKHTVDLTHHFHFRGNRVTEVRVHINPTTDGPPELLRLLRLLLLLLRPPEGPMSEEQIRQFLRRFYEALDSGDADTAASLFHPGVTIHLWDGVTFTSREEFREWFERLFSTSKDAWREIKSLEVRGDTVEVHVQLHFTLN

SEQ ID NO: 393 - protein, 141 aa, synthetic construct
GQKHTVDLTHHFHFRGNRVTEVRVHIRPLDEDPLAAAHARHQGRRWAPPEGPPISEEQIRQFLRRFYEALDSGDADTAASLFHPGVTIHLWDGVTFTSREEFREWFERLFSTSKDAWREIKSLEVRGDTVEVHVQLHFTLN

SEQ ID NO: 394 - protein, 141 aa, synthetic construct
GQKHTVDLTHHFHFRGNRVTEVRVHITPLDEAPLAEKHAKHQGQRWSPPEGPPISEEQIRQFLRRFYEALDSGDADTAASLFHPGVTIHLWDGVTFTSREEFREWFERLFSTSKDAWREIKSLEVRGDTVEVHVQLHFTLN

SEQ ID NO: 395 - protein, 141 aa, synthetic construct
GQKHTVDLTHHFHFRGNRVTEVRVHIRPLDEDPLVAAHAKHQGTRWAPPEGPPISEEQIRQFLRRFYEALDSGDADTAASLFHPGVTIHLWDGVTFTSREEFREWFERLFSTSKDAWREIKSLEVRGDTVEVHVQLHFTLN

SEQ ID NO: 396 - protein, 141 aa, synthetic construct
GQKHTVDLTHHFHFRGNRVTEVRVHITPLDEAPLAAAHARHQGRRWRPPEGPPISEEQIRQFLRRFYEALDSGDADTAASLFHPGVTIHLWDGVTFTSREEFREWFERLFSTSKDAWREIKSLEVRGDTVEVHVQLHFTLN

SEQ ID NO: 397 - protein, 141 aa, synthetic construct
GQKHTVDLTHHFHFRGNRVTEVRVHITPLDAAPLAAALAQHQGTRWRPPEGPPISEEQIRQFLRRFYEALDSGDADTAASLFHPGVTIHLWDGVTFTSREEFREWFERLFSTSKDAWREIKSLEVRGDTVEVHVQLHFTLN

SEQ ID NO: 398 - protein, 141 aa, synthetic construct
GQKHTVDLTHHFHFRGNRVTEVRVHITPLDEAPLAAAHAKHQGRRWRPPEGPPISEEQIRQFLRRFYEALDSGDADTAASLFHPGVTIHLWDGVTFTSREEFREWFERLFSTSKDAWREIKSLEVRGDTVEVHVQLHFTLN

SEQ ID NO: 399 - protein, 141 aa, synthetic construct
GQKHTVDLTHHFHFRGNRVTEVRVHIRPLDEAPLAEKHAKHQGRRWRPPEGPPISEEQIRQFLRRFYEALDSGDADTAASLFHPGVTIHLWDGVTFTSREEFREWFERLFSTSKDAWREIKSLEVRGDTVEVHVQLHFTLN

SEQ ID NO: 400 - protein, 141 aa, synthetic construct
GQKHTVDLTHHFHFRGNRVTEVRVHIRPLDEAPLVEKHSKHQGQRWAPPEGPPISEEQIRQFLRRFYEALDSGDADTAASLFHPGVTIHLWDGVTFTSREEFREWFERLFSTSKDAWREIKSLEVRGDTVEVHVQLHFTLN

SEQ ID NO: 401 - protein, 141 aa, synthetic construct
GQKHTVDLTHHFHFRGNRVTEVRVHITPLDEAPLAAAHAQHQGQRWAPPEGPPISEEQIRQFLRRFYEALDSGDADTAASLFHPGVTIHLWDGVTFTSREEFREWFERLFSTSKDAWREIKSLEVRGDTVEVHVQLHFTLN

SEQ ID NO: 402 - protein, 141 aa, synthetic construct
GQKHTVDLTHHFHFRGNRVTEVRVHITPLDEDPLAAAHAQHQGRRWAPPEGPPISEEQIRQFLRRFYEALDSGDADTAASLFHPGVTIHLWDGVTFTSREEFREWFERLFSTSKDAWREIKSLEVRGDTVEVHVQLHFTLN

SEQ ID NO: 403 - protein, 141 aa, synthetic construct
GQKHTVDLTHHFHFRGNRVTEVRVHITPLDDAPLAEKHAKHQGQRWEPPEGPPISEEQIRQFLRRFYEALDSGDADTAASLFHPGVTIHLWDGVTFTSREEFREWFERLFSTSKDAWREIKSLEVRGDTVEVHVQLHFTLN

SEQ ID NO: 404 - protein, 141 aa, synthetic construct
GQKHTVDLTHHFHFRGNRVTEVRVHIRPLDDSPLAEKHAKHQGQRWSPPEGPPISEEQIRQFLRRFYEALDSGDADTAASLFHPGVTIHLWDGVTFTSREEFREWFERLFSTSKDAWREIKSLEVRGDTVEVHVQLHFTLN

SEQ ID NO: 405 - protein, 141 aa, synthetic construct
GQKHTVDLTHHFHFRGNRVTEVRVHITPLDDDPLAAALAKHQGTRWSPPEGPPISEEQIRQFLRRFYEALDSGDADTAASLFHPGVTIHLWDGVTFTSREEFREWFERLFSTSKDAWREIKSLEVRGDTVEVHVQLHFTLN

SEQ ID NO: 406 - protein, 141 aa, synthetic construct
GQKHTVDLTHHFHFRGNRVTEVRVHITPLDEDPLVAAHAKHQGQRWAPPEGPPISEEQIRQFLRRFYEALDSGDADTAASLFHPGVTIHLWDGVTFTSREEFREWFERLFSTSKDAWREIKSLEVRGDTVEVHVQLHFTLN

SEQ ID NO: 407 - protein, 141 aa, synthetic construct
GQKHTVDLTHHFHFRGNRVTEVRVHIRPLDEDPLAAAHAQHQGQRWAPPEGPPISEEQIRQFLRRFYEALDSGDADTAASLFHPGVTIHLWDGVTFTSREEFREWFERLFSTSKDAWREIKSLEVRGDTVEVHVQLHFTLN

SEQ ID NO: 408 - protein, 141 aa, synthetic construct
GQKHTVDLTHHFHFRGNRVTEVRVHITPLDEDPLAAAHAKHQGQRWAPPEGPPISEEQIRQFLRRFYEALDSGDADTAASLFHPGVTIHLWDGVTFTSREEFREWFERLFSTSKDAWREIKSLEVRGDTVEVHVQLHFTLN

SEQ ID NO: 409 - protein, 141 aa, synthetic construct
GQKHTVDLTHHFHFRGNRVTEVRVHITPLDEAPLAAALAKHQGRRWAPPEGPPISEEQIRQFLRRFYEALDSGDADTAASLFHPGVTIHLWDGVTFTSREEFREWFERLFSTSKDAWREIKSLEVRGDTVEVHVQLHFTLN

SEQ ID NO: 410 - protein, 141 aa, synthetic construct
GQKHTVDLTHHFHFRGNRVTEVRVHIRPLDEAPLAAAHARHQGRRWAPPEGPPISEEQIRQFLRRFYEALDSGDADTAASLFHPGVTIHLWDGVTFTSREEFREWFERLFSTSKDAWREIKSLEVRGDTVEVHVQLHFTLN

SEQ ID NO: 411 - protein, 141 aa, synthetic construct
GQKHTVDLTHHFHFRGNRVTEVRVHITPLDAAPLAAAHAQHQGQRWEPPEGPPISEEQIRQFLRRFYEALDSGDADTAASLFHPGVTIHLWDGVTFTSREEFREWFERLFSTSKDAWREIKSLEVRGDTVEVHVQLHFTLN

SEQ ID NO: 412 - protein, 141 aa, synthetic construct
GQKHTVDLTHHFHFRGNRVTEVRVHITPLDDDPLVAAHARHQGREWRPPEGPPISEEQIRQFLRRFYEALDSGDADTAASLFHPGVTIHLWDGVTFTSREEFREWFERLFSTSKDAWREIKSLEVRGDTVEVHVQLHFTLN

SEQ ID NO: 413 - protein, 142 aa, synthetic construct
GQKHTVDLTHHFHFRGNRVTEVRVHINPTTDGPEEELLLLRRLLLLLEEPEGGPMSEEQIRQFLRRFYEALDSGDADTAASLFHPGVTIHLWDGVTFTSREEFREWFERLFSTSKDAWREIKSLEVRGDTVEVHVQLHFTLN

SEQ ID NO: 414 - protein, 142 aa, synthetic construct
GQKHTVDLTHHFHFRGNRVTEVRVHIKPLDGHPFLLALAAHQPGFERTPAGGEPISEEQIRQFLRRFYEALDSGDADTAASLFHPGVTIHLWDGVTFTSREEFREWFERLFSTSKDAWREIKSLEVRGDTVEVHVQLHFTLN

SEQ ID NO: 415 - protein, 142 aa, synthetic construct
GQKHTVDLTHHFHFRGNRVTEVRVHIAPRDGHPFFLKAAAHQPAAEERPAGGEPISEEQIRQFLRRFYEALDSGDADTAASLFHPGVTIHLWDGVTFTSREEFREWFERLFSTSKDAWREIKSLEVRGDTVEVHVQLHFTLN

SEQ ID NO: 416 - protein, 142 aa, synthetic construct
GQKHTVDLTHHFHFRGNRVTEVRVHIADRDGHPLVLAAAAHQPGLEGRPAGGPPISEEQIRQFLRRFYEALDSGDADTAASLFHPGVTIHLWDGVTFTSREEFREWFERLFSTSKDAWREIKSLEVRGDTVEVHVQLHFTLN

SEQ ID NO: 417 - protein, 142 aa, synthetic construct
GQKHTVDLTHHFHFRGNRVTEVRVHIAPRDGHPAFLAAAAAQPGREAEPAGGPPISEEQIRQFLRRFYEALDSGDADTAASLFHPGVTIHLWDGVTFTSREEFREWFERLFSTSKDAWREIKSLEVRGDTVEVHVQLHFTLN

SEQ ID NO: 418 - protein, 142 aa, synthetic construct
GQKHTVDLTHHFHFRGNRVTEVRVHIAPLDGHPLLLAAAAAQPGLEGAPAGGPPISEEQIRQFLRRFYEALDSGDADTAASLFHPGVTIHLWDGVTFTSREEFREWFERLFSTSKDAWREIKSLEVRGDTVEVHVQLHFTLN

SEQ ID NO: 419 - protein, 142 aa, synthetic construct
GQKHTVDLTHHFHFRGNRVTEVRVHIEPLDGHPFLLAAAAAQPGLEGRPAGGPPISEEQIRQFLRRFYEALDSGDADTAASLFHPGVTIHLWDGVTFTSREEFREWFERLFSTSKDAWREIKSLEVRGDTVEVHVQLHFTLN

SEQ ID NO: 420 - protein, 142 aa, synthetic construct
GQKHTVDLTHHFHFRGNRVTEVRVHIAPLDGHPALLAAAAHQPGFDRTPAGGPPISEEQIRQFLRRFYEALDSGDADTAASLFHPGVTIHLWDGVTFTSREEFREWFERLFSTSKDAWREIKSLEVRGDTVEVHVQLHFTLN

SEQ ID NO: 421 - protein, 142 aa, synthetic construct
GQKHTVDLTHHFHFRGNRVTEVRVHIRPLDGDPALLAAAAAQPGREAVPAGGPPISEEQIRQFLRRFYEALDSGDADTAASLFHPGVTIHLWDGVTFTSREEFREWFERLFSTSKDAWREIKSLEVRGDTVEVHVQLHFTLN

SEQ ID NO: 422 - protein, 142 aa, synthetic construct
GQKHTVDLTHHFHFRGNRVTEVRVHIAPRDGHPALLAAAAHQPGREGRPAGGPPISEEQIRQFLRRFYEALDSGDADTAASLFHPGVTIHLWDGVTFTSREEFREWFERLFSTSKDAWREIKSLEVRGDTVEVHVQLHFTLN

SEQ ID NO: 423 - protein, 142 aa, synthetic construct
GQKHTVDLTHHFHFRGNRVTEVRVHIRPKDGHPFLLAAAARQPGFEARPAGGPPISEEQIRQFLRRFYEALDSGDADTAASLFHPGVTIHLWDGVTFTSREEFREWFERLFSTSKDAWREIKSLEVRGDTVEVHVQLHFTLN

SEQ ID NO: 424 - protein, 142 aa, synthetic construct
GQKHTVDLTHHFHFRGNRVTEVRVHIRPLDGDPALLAAAAAQPGFEGRPAGGPPISEEQIRQFLRRFYEALDSGDADTAASLFHPGVTIHLWDGVTFTSREEFREWFERLFSTSKDAWREIKSLEVRGDTVEVHVQLHFTLN

SEQ ID NO: 425 - protein, 142 aa, synthetic construct
GQKHTVDLTHHFHFRGNRVTEVRVHIAPRDGHPFLLAAAAAQPGRAGRPAGGPPISEEQIRQFLRRFYEALDSGDADTAASLFHPGVTIHLWDGVTFTSREEFREWFERLFSTSKDAWREIKSLEVRGDTVEVHVQLHFTLN

SEQ ID NO: 426 - protein, 142 aa, synthetic construct
GQKHTVDLTHHFHFRGNRVTEVRVHIRPLDGHPALLAAAAAQPGLERRPAGGEPISEEQIRQFLRRFYEALDSGDADTAASLFHPGVTIHLWDGVTFTSREEFREWFERLFSTSKDAWREIKSLEVRGDTVEVHVQLHFTLN

SEQ ID NO: 427 - protein, 142 aa, synthetic construct
GQKHTVDLTHHFHFRGNRVTEVRVHIASRDGHPLILAAAAHQPGLEGVPAGGPPISEEQIRQFLRRFYEALDSGDADTAASLFHPGVTIHLWDGVTFTSREEFREWFERLFSTSKDAWREIKSLEVRGDTVEVHVQLHFTLN

SEQ ID NO: 428 - protein, 142 aa, synthetic construct
GQKHTVDLTHHFHFRGNRVTEVRVHIAPRDGHPLLLAAAAAQPGREGVPAGGPPISEEQIRQFLRRFYEALDSGDADTAASLFHPGVTIHLWDGVTFTSREEFREWFERLFSTSKDAWREIKSLEVRGDTVEVHVQLHFTLN

SEQ ID NO: 429 - protein, 142 aa, synthetic construct
GQKHTVDLTHHFHFRGNRVTEVRVHIRPLDGDPAVLAAAAAQPGFEGTPAGGPPISEEQIRQFLRRFYEALDSGDADTAASLFHPGVTIHLWDGVTFTSREEFREWFERLFSTSKDAWREIKSLEVRGDTVEVHVQLHFTLN

SEQ ID NO: 430 - protein, 142 aa, synthetic construct
GQKHTVDLTHHFHFRGNRVTEVRVHIRDRDGHPALLAAAAAQPGFEGRPAGGPPISEEQIRQFLRRFYEALDSGDADTAASLFHPGVTIHLWDGVTFTSREEFREWFERLFSTSKDAWREIKSLEVRGDTVEVHVQLHFTLN

SEQ ID NO: 431 - protein, 142 aa, synthetic construct
GQKHTVDLTHHFHFRGNRVTEVRVHIKPKDGHPFLLKAAAAQPGFEARPAGGEPISEEQIRQFLRRFYEALDSGDADTAASLFHPGVTIHLWDGVTFTSREEFREWFERLFSTSKDAWREIKSLEVRGDTVEVHVQLHFTLN

SEQ ID NO: 432 - protein, 142 aa, synthetic construct
GQKHTVDLTHHFHFRGNRVTEVRVHIAPLDGHPALLAAAAAQPAAEAVPAGGPPISEEQIRQFLRRFYEALDSGDADTAASLFHPGVTIHLWDGVTFTSREEFREWFERLFSTSKDAWREIKSLEVRGDTVEVHVQLHFTLN

SEQ ID NO: 433 - protein, 142 aa, synthetic construct
GQKHTVDLTHHFHFRGNRVTEVRVHIRPLDGHPFLLERAAAQPGREGVPAGGPPISEEQIRQFLRRFYEALDSGDADTAASLFHPGVTIHLWDGVTFTSREEFREWFERLFSTSKDAWREIKSLEVRGDTVEVHVQLHFTLN

SEQ ID NO: 434 - protein, 143 aa, synthetic construct
GQKHTVDLTHHFHFRGNRVTEVRVHINPTTDGPPELLRRLLEELLLLEEPEEGPPMSEEQIRQFLRRFYEALDSGDADTAASLFHPGVTIHLWDGVTFTSREEFREWFERLFSTSKDAWREIKSLEVRGDTVEVHVQLHFTLN

SEQ ID NO: 435 - protein, 143 aa, synthetic construct
GQKHTVDLTHHFHFRGNRVTEVRVHIHPLNGPPAVAALVAAHQTERGRPREGPPSLSEEQIRQFLRRFYEALDSGDADTAASLFHPGVTIHLWDGVTFTSREEFREWFERLFSTSKDAWREIKSLEVRGDTVEVHVQLHFTLN

SEQ ID NO: 436 - protein, 143 aa, synthetic construct
GQKHTVDLTHHFHFRGNRVTEVRVHIYPKNGPPFLTALVEKFQTDRGRPREGPPSLSEEQIRQFLRRFYEALDSGDADTAASLFHPGVTIHLWDGVTFTSREEFREWFERLFSTSKDAWREIKSLEVRGDTVEVHVQLHFTLN

SEQ ID NO: 437 - protein, 143 aa, synthetic construct
GQKHTVDLTHHFHFRGNRVTEVRVHIYPRNGPPAVTALVSRFQRDRGRPREGPPSLSEEQIRQFLRRFYEALDSGDADTAASLFHPGVTIHLWDGVTFTSREEFREWFERLFSTSKDAWREIKSLEVRGDTVEVHVQLHFTLN

SEQ ID NO: 438 - protein, 143 aa, synthetic construct
GQKHTVDLTHHFHFRGNRVTEVRVHIYPVNGPPAVAARVAAHLTDRGRPREGPPSLSEEQIRQFLRRFYEALDSGDADTAASLFHPGVTIHLWDGVTFTSREEFREWFERLFSTSKDAWREIKSLEVRGDTVEVHVQLHFTLN

SEQ ID NO: 439 - protein, 143 aa, synthetic construct
GQKHTVDLTHHFHFRGNRVTEVRVHIHPVNGPPAVTALVAAHQTDRGRPREGPPSLSEEQIRQFLRRFYEALDSGDADTAASLFHPGVTIHLWDGVTFTSREEFREWFERLFSTSKDAWREIKSLEVRGDTVEVHVQLHFTLN

SEQ ID NO: 440 - protein, 143 aa, synthetic construct
GQKHTVDLTHHFHFRGNRVTEVRVHIFPKNGPPAVTALVEKHQTDLDRPREGPPSLSEEQIRQFLRRFYEALDSGDADTAASLFHPGVTIHLWDGVTFTSREEFREWFERLFSTSKDAWREIKSLEVRGDTVEVHVQLHFTLN

SEQ ID NO: 441 - protein, 143 aa, synthetic construct
GQKHTVDLTHHFHFRGNRVTEVRVHIHPRNGPPFVVALVERFQTDRGRPTEGPPSISEEQIRQFLRRFYEALDSGDADTAASLFHPGVTIHLWDGVTFTSREEFREWFERLFSTSKDAWREIKSLEVRGDTVEVHVQLHFTLN

SEQ ID NO: 442 - protein, 143 aa, synthetic construct
GQKHTVDLTHHFHFRGNRVTEVRVHIHPLNGPPAVVARVAAHLTDWGRPREGPPSLSEEQIRQFLRRFYEALDSGDADTAASLFHPGVTIHLWDGVTFTSREEFREWFERLFSTSKDAWREIKSLEVRGDTVEVHVQLHFTLN

SEQ ID NO: 443 - protein, 143 aa, synthetic construct
GQKHTVDLTHHFHFRGNRVTEVRVHIHPRNGPPAVAARVAAHQTAAGEPREGPPSLSEEQIRQFLRRFYEALDSGDADTAASLFHPGVTIHLWDGVTFTSREEFREWFERLFSTSKDAWREIKSLEVRGDTVEVHVQLHFTLN

SEQ ID NO: 444 - protein, 143 aa, synthetic construct
GQKHTVDLTHHFHFRGNRVTEVRVHIHPRNGPPFVTALVSRFQTDAGRPREGPPSLSEEQIRQFLRRFYEALDSGDADTAASLFHPGVTIHLWDGVTFTSREEFREWFERLFSTSKDAWREIKSLEVRGDTVEVHVQLHFTLN

SEQ ID NO: 445 - protein, 143 aa, synthetic construct
GQKHTVDLTHHFHFRGNRVTEVRVHIHPLNGPPAVTALVQKHQTDFGEPTEGPPSLSEEQIRQFLRRFYEALDSGDADTAASLFHPGVTIHLWDGVTFTSREEFREWFERLFSTSKDAWREIKSLEVRGDTVEVHVQLHFTLN

SEQ ID NO: 446 - protein, 143 aa, synthetic construct
GQKHTVDLTHHFHFRGNRVTEVRVHIYPKNGPPFVVALVEKHQTDRGRPREGPPSLSEEQIRQFLRRFYEALDSGDADTAASLFHPGVTIHLWDGVTFTSREEFREWFERLFSTSKDAWREIKSLEVRGDTVEVHVQLHFTLN

SEQ ID NO: 447 - protein, 143 aa, synthetic construct
GQKHTVDLTHHFHFRGNRVTEVRVHIHPVNGPPALVALVSAHQTEAGDPREGPPSLSEEQIRQFLRRFYEALDSGDADTAASLFHPGVTIHLWDGVTFTSREEFREWFERLFSTSKDAWREIKSLEVRGDTVEVHVQLHFTLN

SEQ ID NO: 448 - protein, 143 aa, synthetic construct
GQKHTVDLTHHFHFRGNRVTEVRVHIHPLNGPPAVAALVAAHQTDRGRPREGPPSLSEEQIRQFLRRFYEALDSGDADTAASLFHPGVTIHLWDGVTFTSREEFREWFERLFSTSKDAWREIKSLEVRGDTVEVHVQLHFTLN

SEQ ID NO: 449 - protein, 143 aa, synthetic construct
GQKHTVDLTHHFHFRGNRVTEVRVHIHPVNGPPAVAARVAAHQTDRGRPREGPPSLSEEQIRQFLRRFYEALDSGDADTAASLFHPGVTIHLWDGVTFTSREEFREWFERLFSTSKDAWREIKSLEVRGDTVEVHVQLHFTLN

SEQ ID NO: 450 - protein, 143 aa, synthetic construct
GQKHTVDLTHHFHFRGNRVTEVRVHIHPVNGPPAVTALVEKHQTDRDHPREGPPSLSEEQIRQFLRRFYEALDSGDADTAASLFHPGVTIHLWDGVTFTSREEFREWFERLFSTSKDAWREIKSLEVRGDTVEVHVQLHFTLN

SEQ ID NO: 451 - protein, 143 aa, synthetic construct
GQKHTVDLTHHFHFRGNRVTEVRVHIHPVNGPPSVAARVAKHLTDFGRPREGPPSLSEEQIRQFLRRFYEALDSGDADTAASLFHPGVTIHLWDGVTFTSREEFREWFERLFSTSKDAWREIKSLEVRGDTVEVHVQLHFTLN

SEQ ID NO: 452 - protein, 143 aa, synthetic construct
GQKHTVDLTHHFHFRGNRVTEVRVHIHPRDGPAAVTALVAAHQTERGRPREGPPSLSEEQIRQFLRRFYEALDSGDADTAASLFHPGVTIHLWDGVTFTSREEFREWFERLFSTSKDAWREIKSLEVRGDTVEVHVQLHFTLN

SEQ ID NO: 453 - protein, 143 aa, synthetic construct
GQKHTVDLTHHFHFRGNRVTEVRVHIHPVNGPPAVTARVAKHQTDFGHPVEGPPSLSEEQIRQFLRRFYEALDSGDADTAASLFHPGVTIHLWDGVTFTSREEFREWFERLFSTSKDAWREIKSLEVRGDTVEVHVQLHFTLN

SEQ ID NO: 454 - protein, 143 aa, synthetic construct
GQKHTVDLTHHFHFRGNRVTEVRVHIYPLNGPESLVARVEKHQRDRGRPREGPPSLSEEQIRQFLRRFYEALDSGDADTAASLFHPGVTIHLWDGVTFTSREEFREWFERLFSTSKDAWREIKSLEVRGDTVEVHVQLHFTLN

SEQ ID NO: 455 - protein, 144 aa, synthetic construct
GQKHTVDLTHHFHFRGNRVTEVRVHINPTTDEPPELLELLRLLRELLLLLEPEGGPMSEEQIRQFLRRFYEALDSGDADTAASLFHPGVTIHLWDGVTFTSREEFREWFERLFSTSKDAWREIKSLEVRGDTVEVHVQLHFTLN

SEQ ID NO: 456 - protein, 144 aa, synthetic construct
GQKHTVDLTHHFHFRGNRVTEVRVHITPLDSPPCLTAALKEYEAAAEEWGPFSGEPISEEQIRQFLRRFYEALDSGDADTAASLFHPGVTIHLWDGVTFTSREEFREWFERLFSTSKDAWREIKSLEVRGDTVEVHVQLHFTLN

SEQ ID NO: 457 - protein, 144 aa, synthetic construct
GQKHTVDLTHHFHFRGNRVTEVRVHIRPLDSPPCITAALKEYEAAAAALAPFSGPPISEEQIRQFLRRFYEALDSGDADTAASLFHPGVTIHLWDGVTFTSREEFREWFERLFSTSKDAWREIKSLEVRGDTVEVHVQLHFTLN

SEQ ID NO: 458 - protein, 144 aa, synthetic construct
GQKHTVDLTHHFHFRGNRVTEVRVHIEPLDAPPAITAALARYRAAAEEWAPFTGPPISEEQIRQFLRRFYEALDSGDADTAASLFHPGVTIHLWDGVTFTSREEFREWFERLFSTSKDAWREIKSLEVRGDTVEVHVQLHFTLN

SEQ ID NO: 459 - protein, 144 aa, synthetic construct
GQKHTVDLTHHFHFRGNRVTEVRVHIEPLDAPPCLTARLAEYRAAAEELAPFTGPPISEEQIRQFLRRFYEALDSGDADTAASLFHPGVTIHLWDGVTFTSREEFREWFERLFSTSKDAWREIKSLEVRGDTVEVHVQLHFTLN

SEQ ID NO: 460 - protein, 144 aa, synthetic construct
GQKHTVDLTHHFHFRGNRVTEVRVHIRPLDSPPFITKRLAEYERAADEWAPFTGPPISEEQIRQFLRRFYEALDSGDADTAASLFHPGVTIHLWDGVTFTSREEFREWFERLFSTSKDAWREIKSLEVRGDTVEVHVQLHFTLN

SEQ ID NO: 461 - protein, 144 aa, synthetic construct
GQKHTVDLTHHFHFRGNRVTEVRVHIEPLDSPPVLTALLERYRAAADPWAPFTGPPISEEQIRQFLRRFYEALDSGDADTAASLFHPGVTIHLWDGVTFTSREEFREWFERLFSTSKDAWREIKSLEVRGDTVEVHVQLHFTLN

SEQ ID NO: 462 - protein, 144 aa, synthetic construct
GQKHTVDLTHHFHFRGNRVTEVRVHITPLDSPPFLTERLAEFEAEAEEWAPFEGPPISEEQIRQFLRRFYEALDSGDADTAASLFHPGVTIHLWDGVTFTSREEFREWFERLFSTSKDAWREIKSLEVRGDTVEVHVQLHFTLN

SEQ ID NO: 463 - protein, 144 aa, synthetic construct
GQKHTVDLTHHFHFRGNRVTEVRVHIRPLDNPPLITALLARYEAAAEPLAPFTGPPISEEQIRQFLRRFYEALDSGDADTAASLFHPGVTIHLWDGVTFTSREEFREWFERLFSTSKDAWREIKSLEVRGDTVEVHVQLHFTLN

SEQ ID NO: 464 - protein, 144 aa, synthetic construct
GQKHTVDLTHHFHFRGNRVTEVRVHITPLDNPPFLTAALAEFAAAAEELGPFSGPPISEEQIRQFLRRFYEALDSGDADTAASLFHPGVTIHLWDGVTFTSREEFREWFERLFSTSKDAWREIKSLEVRGDTVEVHVQLHFTLN

SEQ ID NO: 465 - protein, 144 aa, synthetic construct
GQKHTVDLTHHFHFRGNRVTEVRVHIRPLDNPPLITALLARFEAEAEEWAPFTGPPISEEQIRQFLRRFYEALDSGDADTAASLFHPGVTIHLWDGVTFTSREEFREWFERLFSTSKDAWREIKSLEVRGDTVEVHVQLHFTLN

SEQ ID NO: 466 - protein, 144 aa, synthetic construct
GQKHTVDLTHHFHFRGNRVTEVRVHIRPLDAPPCLTAALATYEAAAEEWAPFTGEPISEEQIRQFLRRFYEALDSGDADTAASLFHPGVTIHLWDGVTFTSREEFREWFERLFSTSKDAWREIKSLEVRGDTVEVHVQLHFTLN

SEQ ID NO: 467 - protein, 144 aa, synthetic construct
GQKHTVDLTHHFHFRGNRVTEVRVHIKPLDKPPLLTELLKEFEKEAEEWAPFTGPPISEEQIRQFLRRFYEALDSGDADTAASLFHPGVTIHLWDGVTFTSREEFREWFERLFSTSKDAWREIKSLEVRGDTVEVHVQLHFTLN

SEQ ID NO: 468 - protein, 144 aa, synthetic construct
GQKHTVDLTHHFHFRGNRVTEVRVHITPLDNPPFLTERLKEYEKEAAELAPFTGPPISEEQIRQFLRRFYEALDSGDADTAASLFHPGVTIHLWDGVTFTSREEFREWFERLFSTSKDAWREIKSLEVRGDTVEVHVQLHFTLN

SEQ ID NO: 469 - protein, 144 aa, synthetic construct
GQKHTVDLTHHFHFRGNRVTEVRVHIEPLDSPPFLTKALKEFEKEREEWAPFTGPPISEEQIRQFLRRFYEALDSGDADTAASLFHPGVTIHLWDGVTFTSREEFREWFERLFSTSKDAWREIKSLEVRGDTVEVHVQLHFTLN

SEQ ID NO: 470 - protein, 144 aa, synthetic construct
GQKHTVDLTHHFHFRGNRVTEVRVHITPLDSPPFLTALGALFELAADPLAPFEGPPISEEQIRQFLRRFYEALDSGDADTAASLFHPGVTIHLWDGVTFTSREEFREWFERLFSTSKDAWREIKSLEVRGDTVEVHVQLHFTLN

SEQ ID NO: 471 - protein, 144 aa, synthetic construct
GQKHTVDLTHHFHFRGNRVTEVRVHIRPLDAPPCLTAALAEYEAEAEELAPFDGPPISEEQIRQFLRRFYEALDSGDADTAASLFHPGVTIHLWDGVTFTSREEFREWFERLFSTSKDAWREIKSLEVRGDTVEVHVQLHFTLN

SEQ ID NO: 472 - protein, 144 aa, synthetic construct
GQKHTVDLTHHFHFRGNRVTEVRVHIRPLDSPPCITARLKEYEKELEELAPFEGPPISEEQIRQFLRRFYEALDSGDADTAASLFHPGVTIHLWDGVTFTSREEFREWFERLFSTSKDAWREIKSLEVRGDTVEVHVQLHFTLN

SEQ ID NO: 473 - protein, 144 aa, synthetic construct
GQKHTVDLTHHFHFRGNRVTEVRVHIEPLDSPPLLTALKALFDAAAEPLAPFTGPPISEEQIRQFLRRFYEALDSGDADTAASLFHPGVTIHLWDGVTFTSREEFREWFERLFSTSKDAWREIKSLEVRGDTVEVHVQLHFTLN

SEQ ID NO: 474 - protein, 144 aa, synthetic construct
GQKHTVDLTHHFHFRGNRVTEVRVHIRPLDSPPFITKRLAEYEKEAEEWAPFTGPPISEEQIRQFLRRFYEALDSGDADTAASLFHPGVTIHLWDGVTFTSREEFREWFERLFSTSKDAWREIKSLEVRGDTVEVHVQLHFTLN

SEQ ID NO: 475 - protein, 144 aa, synthetic construct
GQKHTVDLTHHFHFRGNRVTEVRVHIEPLDSPPFLTEALKTFRAAAEEWAPFTGPPISEEQIRQFLRRFYEALDSGDADTAASLFHPGVTIHLWDGVTFTSREEFREWFERLFSTSKDAWREIKSLEVRGDTVEVHVQLHFTLN

SEQ ID NO: 476 - protein, 145 aa, synthetic construct
GQKHTVDLTHHFHFRGNRVTEVRVHINPTTDGPPELLLLLLRLLLLLLEEPEPPGGPMSEEQIRQFLRRFYEALDSGDADTAASLFHPGVTIHLWDGVTFTSREEFREWFERLFSTSKDAWREIKSLEVRGDTVEVHVQLHFTLN

SEQ ID NO: 477 - protein, 145 aa, synthetic construct
GQKHTVDLTHHFHFRGNRVTEVRVHIEPVDGDPEWLAEAAAAPALELPDPDPPLGPPTSEEQIRQFLRRFYEALDSGDADTAASLFHPGVTIHLWDGVTFTSREEFREWFERLFSTSKDAWREIKSLEVRGDTVEVHVQLHFTLN

SEQ ID NO: 478 - protein, 145 aa, synthetic construct
GQKHTVDLTHHFHFRGNRVTEVRVHIEPVDGDPEILAEAAAAPALELPDPDPPLGPPTSEEQIRQFLRRFYEALDSGDADTAASLFHPGVTIHLWDGVTFTSREEFREWFERLFSTSKDAWREIKSLEVRGDTVEVHVQLHFTLN

SEQ ID NO: 479 - protein, 145 aa, synthetic construct
GQKHTVDLTHHFHFRGNRVTEVRVHIKPVDGDPEWLAAAAAAPALELPDPDPPLGPPTSEEQIRQFLRRFYEALDSGDADTAASLFHPGVTIHLWDGVTFTSREEFREWFERLFSTSKDAWREIKSLEVRGDTVEVHVQLHFTLN

SEQ ID NO: 480 - protein, 145 aa, synthetic construct
GQKHTVDLTHHFHFRGNRVTEVRVHITPRDGHPEWLAEAAAAPALELPDPDPPLGPPTSEEQIRQFLRRFYEALDSGDADTAASLFHPGVTIHLWDGVTFTSREEFREWFERLFSTSKDAWREIKSLEVRGDTVEVHVQLHFTLN

SEQ ID NO: 481 - protein, 145 aa, synthetic construct
GQKHTVDLTHHFHFRGNRVTEVRVHIAPRDGDPDFLARAAAAAALELPDPDPPLGPPTSEEQIRQFLRRFYEALDSGDADTAASLFHPGVTIHLWDGVTFTSREEFREWFERLFSTSKDAWREIKSLEVRGDTVEVHVQLHFTLN

SEQ ID NO: 482 - protein, 145 aa, synthetic construct
GQKHTVDLTHHFHFRGNRVTEVRVHITPVDGDPAWLAAAAAAPALELPDPDPPLGPPTSEEQIRQFLRRFYEALDSGDADTAASLFHPGVTIHLWDGVTFTSREEFREWFERLFSTSKDAWREIKSLEVRGDTVEVHVQLHFTLN

SEQ ID NO: 483 - protein, 145 aa, synthetic construct
GQKHTVDLTHHFHFRGNRVTEVRVHIRPRDGDPGFLAAAAAAPALELPDPDPPLGPPTSEEQIRQFLRRFYEALDSGDADTAASLFHPGVTIHLWDGVTFTSREEFREWFERLFSTSKDAWREIKSLEVRGDTVEVHVQLHFTLN

SEQ ID NO: 484 - protein, 145 aa, synthetic construct
GQKHTVDLTHHFHFRGNRVTEVRVHIAPVDGDPGFLAEAAAAPALELPLPDPPLGPETSEEQIRQFLRRFYEALDSGDADTAASLFHPGVTIHLWDGVTFTSREEFREWFERLFSTSKDAWREIKSLEVRGDTVEVHVQLHFTLN

SEQ ID NO: 485 - protein, 145 aa, synthetic construct
GQKHTVDLTHHFHFRGNRVTEVRVHITPVDGDPDWLAAAAAAPALALPDPDPPLGEPTSEEQIRQFLRRFYEALDSGDADTAASLFHPGVTIHLWDGVTFTSREEFREWFERLFSTSKDAWREIKSLEVRGDTVEVHVQLHFTLN

SEQ ID NO: 486 - protein, 145 aa, synthetic construct
GQKHTVDLTHHFHFRGNRVTEVRVHIRPKDGHPDWLAEAAAQPALELPLPDPPLGPPTSEEQIRQFLRRFYEALDSGDADTAASLFHPGVTIHLWDGVTFTSREEFREWFERLFSTSKDAWREIKSLEVRGDTVEVHVQLHFTLN

SEQ ID NO: 487 - protein, 145 aa, synthetic construct
GQKHTVDLTHHFHFRGNRVTEVRVHIAPVDGDPEWLAAAAAAPALELPLPDPPLGPPTSEEQIRQFLRRFYEALDSGDADTAASLFHPGVTIHLWDGVTFTSREEFREWFERLFSTSKDAWREIKSLEVRGDTVEVHVQLHFTLN

SEQ ID NO: 488 - protein, 145 aa, synthetic construct
GQKHTVDLTHHFHFRGNRVTEVRVHIAPVDGDPGFLAEAAAAAALALPDPDPPLGPPTSEEQIRQFLRRFYEALDSGDADTAASLFHPGVTIHLWDGVTFTSREEFREWFERLFSTSKDAWREIKSLEVRGDTVEVHVQLHFTLN

SEQ ID NO: 489 - protein, 145 aa, synthetic construct
GQKHTVDLTHHFHFRGNRVTEVRVHIEPVDGHPEFLAEAAAQEERELPLPDPPLGPPTSEEQIRQFLRRFYEALDSGDADTAASLFHPGVTIHLWDGVTFTSREEFREWFERLFSTSKDAWREIKSLEVRGDTVEVHVQLHFTLN

SEQ ID NO: 490 - protein, 145 aa, synthetic construct
GQKHTVDLTHHFHFRGNRVTEVRVHIAPRDGPPEPLAAAAAAPALELPDPDPPLGPPTSEEQIRQFLRRFYEALDSGDADTAASLFHPGVTIHLWDGVTFTSREEFREWFERLFSTSKDAWREIKSLEVRGDTVEVHVQLHFTLN

SEQ ID NO: 491 - protein, 145 aa, synthetic construct
GQKHTVDLTHHFHFRGNRVTEVRVHITPVDGDPEWLAEAAAQETLELPDPDPPLGPPTSEEQIRQFLRRFYEALDSGDADTAASLFHPGVTIHLWDGVTFTSREEFREWFERLFSTSKDAWREIKSLEVRGDTVEVHVQLHFTLN

SEQ ID NO: 492 - protein, 145 aa, synthetic construct
GQKHTVDLTHHFHFRGNRVTEVRVHIAPVDGDPDVLAEAAAAPALELPLPDPPLGPPTTEEQIRQFLRRFYEALDSGDADTAASLFHPGVTIHLWDGVTFTSREEFREWFERLFSTSKDAWREIKSLEVRGDTVEVHVQLHFTLN

SEQ ID NO: 493 - protein, 145 aa, synthetic construct
GQKHTVDLTHHFHFRGNRVTEVRVHITPVDGDPEWLAEAAAQPALELPDPDPALGPATSEEQIRQFLRRFYEALDSGDADTAASLFHPGVTIHLWDGVTFTSREEFREWFERLFSTSKDAWREIKSLEVRGDTVEVHVQLHFTLN

SEQ ID NO: 494 - protein, 145 aa, synthetic construct
GQKHTVDLTHHFHFRGNRVTEVRVHIEPVDGDPEFLARAAAAPELELPLPDPPLGPPTSEEQIRQFLRRFYEALDSGDADTAASLFHPGVTIHLWDGVTFTSREEFREWFERLFSTSKDAWREIKSLEVRGDTVEVHVQLHFTLN

SEQ ID NO: 495 - protein, 145 aa, synthetic construct
GQKHTVDLTHHFHFRGNRVTEVRVHITPVDGDPGFLAEAAAQPALELPDPDPALGPPTSEEQIRQFLRRFYEALDSGDADTAASLFHPGVTIHLWDGVTFTSREEFREWFERLFSTSKDAWREIKSLEVRGDTVEVHVQLHFTLN

SEQ ID NO: 496 - protein, 145 aa, synthetic construct
GQKHTVDLTHHFHFRGNRVTEVRVHITPRDGHPGYLAAAAAAAALELPLPDPPLGPPTTEEQIRQFLRRFYEALDSGDADTAASLFHPGVTIHLWDGVTFTSREEFREWFERLFSTSKDAWREIKSLEVRGDTVEVHVQLHFTLN

SEQ ID NO: 497 - protein, 146 aa, synthetic construct
GQKHTVDLTHHFHFRGNRVTEVRVHINPTTDGPEELLRLLLRLLLELLLLLEEPGGPPMSEEQIRQFLRRFYEALDSGDADTAASLFHPGVTIHLWDGVTFTSREEFREWFERLFSTSKDAWREIKSLEVRGDTVEVHVQLHFTLN

SEQ ID NO: 498 - protein, 146 aa, synthetic construct
GQKHTVDLTHHFHFRGNRVTEVRVHITPQDAASGLFARAAAAQARSHGLLGRPGGPPSISEEQIRQFLRRFYEALDSGDADTAASLFHPGVTIHLWDGVTFTSREEFREWFERLFSTSKDAWREIKSLEVRGDTVEVHVQLHFTLN

SEQ ID NO: 499 - protein, 146 aa, synthetic construct
GQKHTVDLTHHFHFRGNRVTEVRVHITPQSELPGLFKRALEAQARSSGLLGRPGGPPSISEEQIRQFLRRFYEALDSGDADTAASLFHPGVTIHLWDGVTFTSREEFREWFERLFSTSKDAWREIKSLEVRGDTVEVHVQLHFTLN

SEQ ID NO: 500 - protein, 146 aa, synthetic construct
GQKHTVDLTHHFHFRGNRVTEVRVHITPLSEESGLFKRAREAQARSHGLLGRPGGPPSISEEQIRQFLRRFYEALDSGDADTAASLFHPGVTIHLWDGVTFTSREEFREWFERLFSTSKDAWREIKSLEVRGDTVEVHVQLHFTLN

SEQ ID NO: 501 - protein, 146 aa, synthetic construct
GQKHTVDLTHHFHFRGNRVTEVRVHITPQDELPGLFKRVLEAQARSNGLLGRPGGPPSISEEQIRQFLRRFYEALDSGDADTAASLFHPGVTIHLWDGVTFTSREEFREWFERLFSTSKDAWREIKSLEVRGDTVEVHVQLHFTLN

SEQ ID NO: 502 - protein, 146 aa, synthetic construct
GQKHTVDLTHHFHFRGNRVTEVRVHITPQTAPDGLFKRAAAAQARASGLLGAPGGPPSWSEEQIRQFLRRFYEALDSGDADTAASLFHPGVTIHLWDGVTFTSREEFREWFERLFSTSKDAWREIKSLEVRGDTVEVHVQLHFTLN

SEQ ID NO: 503 - protein, 146 aa, synthetic construct
GQKHTVDLTHHFHFRGNRVTEVRVHITPQSELPGLFKRVLEAQARSHGLLGRPGGPPSISEEQIRQFLRRFYEALDSGDADTAASLFHPGVTIHLWDGVTFTSREEFREWFERLFSTSKDAWREIKSLEVRGDTVEVHVQLHFTLN

SEQ ID NO: 504 - protein, 146 aa, synthetic construct
GQKHTVDLTHHFHFRGNRVTEVRVHITPLDEEPGLFKRVREAQARSHGLLGRPGGPPSISEEQIRQFLRRFYEALDSGDADTAASLFHPGVTIHLWDGVTFTSREEFREWFERLFSTSKDAWREIKSLEVRGDTVEVHVQLHFTLN

SEQ ID NO: 505 - protein, 146 aa, synthetic construct
GQKHTVDLTHHFHFRGNRVTEVRVHITPRSEPSGLFKRVAEAQAAANGLLGRPGGPPSISEEQIRQFLRRFYEALDSGDADTAASLFHPGVTIHLWDGVTFTSREEFREWFERLFSTSKDAWREIKSLEVRGDTVEVHVQLHFTLN

SEQ ID NO: 506 - protein, 146 aa, synthetic construct
GQKHTVDLTHHFHFRGNRVTEVRVHITPRGPAPGLFKRAAEAQARSSGLLGRPGGPPSISEEQIRQFLRRFYEALDSGDADTAASLFHPGVTIHLWDGVTFTSREEFREWFERLFSTSKDAWREIKSLEVRGDTVEVHVQLHFTLN

SEQ ID NO: 507 - protein, 146 aa, synthetic construct
GQKHTVDLTHHFHFRGNRVTEVRVHITPRDEAPGLFARAAAAQARAAGLLGRPGGPPSISEEQIRQFLRRFYEALDSGDADTAASLFHPGVTIHLWDGVTFTSREEFREWFERLFSTSKDAWREIKSLEVRGDTVEVHVQLHFTLN

SEQ ID NO: 508 - protein, 146 aa, synthetic construct
GQKHTVDLTHHFHFRGNRVTEVRVHITPLSEPGGLFKRAAEAQARSHGRLGRPGGPPSWSEEQIRQFLRRFYEALDSGDADTAASLFHPGVTIHLWDGVTFTSREEFREWFERLFSTSKDAWREIKSLEVRGDTVEVHVQLHFTLN

SEQ ID NO: 509 - protein, 146 aa, synthetic construct
GQKHTVDLTHHFHFRGNRVTEVRVHIAPRTAPGGLFKAVAAAQAAAAGLLGRPGGPPSISEEQIRQFLRRFYEALDSGDADTAASLFHPGVTIHLWDGVTFTSREEFREWFERLFSTSKDAWREIKSLEVRGDTVEVHVQLHFTLN

SEQ ID NO: 510 - protein, 146 aa, synthetic construct
GQKHTVDLTHHFHFRGNRVTEVRVHITPRSEPTGLFKRAAEAQARSSGLLGAPGGPPSWSEEQIRQFLRRFYEALDSGDADTAASLFHPGVTIHLWDGVTFTSREEFREWFERLFSTSKDAWREIKSLEVRGDTVEVHVQLHFTLN

SEQ ID NO: 511 - protein, 146 aa, synthetic construct
GQKHTVDLTHHFHFRGNRVTEVRVHITPLDEPVGLFKRAAEAQARASGLLGRPGGPPSISEEQIRQFLRRFYEALDSGDADTAASLFHPGVTIHLWDGVTFTSREEFREWFERLFSTSKDAWREIKSLEVRGDTVEVHVQLHFTLN

SEQ ID NO: 512 - protein, 146 aa, synthetic construct
GQKHTVDLTHHFHFRGNRVTEVRVHITPLDEAGGFFERALAAQARSSGLLGRPGGPPSISEEQIRQFLRRFYEALDSGDADTAASLFHPGVTIHLWDGVTFTSREEFREWFERLFSTSKDAWREIKSLEVRGDTVEVHVQLHFTLN

SEQ ID NO: 513 - protein, 146 aa, synthetic construct
GQKHTVDLTHHFHFRGNRVTEVRVHITPLSEGTGLFKRAAEAQARHHGLLGRPGGPPSISEEQIRQFLRRFYEALDSGDADTAASLFHPGVTIHLWDGVTFTSREEFREWFERLFSTSKDAWREIKSLEVRGDTVEVHVQLHFTLN

SEQ ID NO: 514 - protein, 146 aa, synthetic construct
GQKHTVDLTHHFHFRGNRVTEVRVHITPLDEAPGLFKRVAEAQARSSGLLGRPGGPPSWSEEQIRQFLRRFYEALDSGDADTAASLFHPGVTIHLWDGVTFTSREEFREWFERLFSTSKDAWREIKSLEVRGDTVEVHVQLHFTLN

SEQ ID NO: 515 - protein, 146 aa, synthetic construct
GQKHTVDLTHHFHFRGNRVTEVRVHITPLDEAPGLFKRAAEAQARAHDLLGRPGGPPSISEEQIRQFLRRFYEALDSGDADTAASLFHPGVTIHLWDGVTFTSREEFREWFERLFSTSKDAWREIKSLEVRGDTVEVHVQLHFTLN

SEQ ID NO: 516 - protein, 146 aa, synthetic construct
GQKHTVDLTHHFHFRGNRVTEVRVHITPLDELPGLFKRVLAAQARSSGLLGRPGGPPSISEEQIRQFLRRFYEALDSGDADTAASLFHPGVTIHLWDGVTFTSREEFREWFERLFSTSKDAWREIKSLEVRGDTVEVHVQLHFTLN

SEQ ID NO: 517 - protein, 146 aa, synthetic construct
GQKHTVDLTHHFHFRGNRVTEVRVHITPQSETTGLGKRALEAQARAHGLLGRPGGPPSISEEQIRQFLRRFYEALDSGDADTAASLFHPGVTIHLWDGVTFTSREEFREWFERLFSTSKDAWREIKSLEVRGDTVEVHVQLHFTLN

SEQ ID NO: 518 - protein, 147 aa, synthetic construct
GQKHTVDLTHHFHFRGNRVTEVRVHINPTTGEEAREFLRELREELRELLRLLPEPPPGPMSEEQIRQFLRRFYEALDSGDADTAASLFHPGVTIHLWDGVTFTSREEFREWFERLFSTSKDAWREIKSLEVRGDTVEVHVQLHFTLN

SEQ ID NO: 519 - protein, 147 aa, synthetic construct
GQKHTVDLTHHFHFRGNRVTEVRVHIFPKDEAAKAAVDAISAEARRFGGRGGGPAEGEPISEEQIRQFLRRFYEALDSGDADTAASLFHPGVTIHLWDGVTFTSREEFREWFERLFSTSKDAWREIKSLEVRGDTVEVHVQLHFTLN

SEQ ID NO: 520 - protein, 147 aa, synthetic construct
GQKHTVDLTHHFHFRGNRVTEVRVHIHPQGPAAQAAVDAISAEARASGGRGGGPAAGEPISEEQIRQFLRRFYEALDSGDADTAASLFHPGVTIHLWDGVTFTSREEFREWFERLFSTSKDAWREIKSLEVRGDTVEVHVQLHFTLN

SEQ ID NO: 521 - protein, 147 aa, synthetic construct
GQKHTVDLTHHFHFRGNRVTEVRVHIFPRDEAAAAAVARIAEEARRFGGRGGGPPEGEPISEEQIRQFLRRFYEALDSGDADTAASLFHPGVTIHLWDGVTFTSREEFREWFERLFSTSKDAWREIKSLEVRGDTVEVHVQLHFTLN

SEQ ID NO: 522 - protein, 147 aa, synthetic construct
GQKHTVDLTHHFHFRGNRVTEVRVHIHPQGPAAQAAVDRIAAEARKDYGRGAGPAEGPPISEEQIRQFLRRFYEALDSGDADTAASLFHPGVTIHLWDGVTFTSREEFREWFERLFSTSKDAWREIKSLEVRGDTVEVHVQLHFTLN

SEQ ID NO: 523 - protein, 147 aa, synthetic construct
GQKHTVDLTHHFHFRGNRVTEVRVHIHPQDAAAREAVERISAEAREFGGRGGGPAEGEPISEEQIRQFLRRFYEALDSGDADTAASLFHPGVTIHLWDGVTFTSREEFREWFERLFSTSKDAWREIKSLEVRGDTVEVHVQLHFTLN

SEQ ID NO: 524 - protein, 147 aa, synthetic construct
GQKHTVDLTHHFHFRGNRVTEVRVHIFPRDEAARAAVERAAAAAREGGGRGGGPPEGEPISEEQIRQFLRRFYEALDSGDADTAASLFHPGVTIHLWDGVTFTSREEFREWFERLFSTSKDAWREIKSLEVRGDTVEVHVQLHFTLN

SEQ ID NO: 525 - protein, 147 aa, synthetic construct
GQKHTVDLTHHFHFRGNRVTEVRVHIHPKDEAAQAAVDRIAAEARAGGGRGAGPAEGEPISEEQIRQFLRRFYEALDSGDADTAASLFHPGVTIHLWDGVTFTSREEFREWFERLFSTSKDAWREIKSLEVRGDTVEVHVQLHFTLN

SEQ ID NO: 526 - protein, 147 aa, synthetic construct
GQKHTVDLTHHFHFRGNRVTEVRVHIHPRDAAAQAAVDRLAEEARRFGGRGAGPPEGPPISEEQIRQFLRRFYEALDSGDADTAASLFHPGVTIHLWDGVTFTSREEFREWFERLFSTSKDAWREIKSLEVRGDTVEVHVQLHFTLN

SEQ ID NO: 527 - protein, 147 aa, synthetic construct
GQKHTVDLTHHFHFRGNRVTEVRVHIHPRDAAAQAAVDALAAEARAGGGRGAGPPEGEPISEEQIRQFLRRFYEALDSGDADTAASLFHPGVTIHLWDGVTFTSREEFREWFERLFSTSKDAWREIKSLEVRGDTVEVHVQLHFTLN

SEQ ID NO: 528 - protein, 147 aa, synthetic construct
GQKHTVDLTHHFHFRGNRVTEVRVHIHPRDAAAAAAVAAAAEAARAGGGRGGGPAEGEPISEEQIRQFLRRFYEALDSGDADTAASLFHPGVTIHLWDGVTFTSREEFREWFERLFSTSKDAWREIKSLEVRGDTVEVHVQLHFTLN

SEQ ID NO: 529 - protein, 147 aa, synthetic construct
GQKHTVDLTHHFHFRGNRVTEVRVHIHPRDAAAQAAVDRLAEELRKFGGRGGGPPEGEPISEEQIRQFLRRFYEALDSGDADTAASLFHPGVTIHLWDGVTFTSREEFREWFERLFSTSKDAWREIKSLEVRGDTVEVHVQLHFTLN

SEQ ID NO: 530 - protein, 147 aa, synthetic construct
GQKHTVDLTHHFHFRGNRVTEVRVHIYPRDAAAQAAVDAVAAEARRFGGRGAGPAEGEPISEEQIRQFLRRFYEALDSGDADTAASLFHPGVTIHLWDGVTFTSREEFREWFERLFSTSKDAWREIKSLEVRGDTVEVHVQLHFTLN

SEQ ID NO: 531 - protein, 147 aa, synthetic construct
GQKHTVDLTHHFHFRGNRVTEVRVHIAPQNAAAQAAVDAIAAEARAGGGRGGGPAEGEPISEEQIRQFLRRFYEALDSGDADTAASLFHPGVTIHLWDGVTFTSREEFREWFERLFSTSKDAWREIKSLEVRGDTVEVHVQLHFTLN

SEQ ID NO: 532 - protein, 147 aa, synthetic construct
GQKHTVDLTHHFHFRGNRVTEVRVHIFPRDAAAQEAVDRLAEEARKFGGRGGGPPEGEPISEEQIRQFLRRFYEALDSGDADTAASLFHPGVTIHLWDGVTFTSREEFREWFERLFSTSKDAWREIKSLEVRGDTVEVHVQLHFTLN

SEQ ID NO: 533 - protein, 147 aa, synthetic construct
GQKHTVDLTHHFHFRGNRVTEVRVHIHPRDEAAAAAVAAAAEAARAGGGRGAGPAEGEPISEEQIRQFLRRFYEALDSGDADTAASLFHPGVTIHLWDGVTFTSREEFREWFERLFSTSKDAWREIKSLEVRGDTVEVHVQLHFTLN

SEQ ID NO: 534 - protein, 147 aa, synthetic construct
GQKHTVDLTHHFHFRGNRVTEVRVHIYPQGPAAQAAVDRVAAEARAGGGRGGGPPEGPPISEEQIRQFLRRFYEALDSGDADTAASLFHPGVTIHLWDGVTFTSREEFREWFERLFSTSKDAWREIKSLEVRGDTVEVHVQLHFTLN

SEQ ID NO: 535 - protein, 147 aa, synthetic construct
GQKHTVDLTHHFHFRGNRVTEVRVHIAPRDEAAAAAVARLSEELRQSGGRGAGPPEGEPISEEQIRQFLRRFYEALDSGDADTAASLFHPGVTIHLWDGVTFTSREEFREWFERLFSTSKDAWREIKSLEVRGDTVEVHVQLHFTLN

SEQ ID NO: 536 - protein, 147 aa, synthetic construct
GQKHTVDLTHHFHFRGNRVTEVRVHIYPKDEAAQAAVDRISEEARKFGGRGAGPAEGEPISEEQIRQFLRRFYEALDSGDADTAASLFHPGVTIHLWDGVTFTSREEFREWFERLFSTSKDAWREIKSLEVRGDTVEVHVQLHFTLN

SEQ ID NO: 537 - protein, 147 aa, synthetic construct
GQKHTVDLTHHFHFRGNRVTEVRVHIFPKDEAAAAAVKRVSEEARKFYGRGGGPPEGEPISEEQIRQFLRRFYEALDSGDADTAASLFHPGVTIHLWDGVTFTSREEFREWFERLFSTSKDAWREIKSLEVRGDTVEVHVQLHFTLN

SEQ ID NO: 538 - protein, 147 aa, synthetic construct
GQKHTVDLTHHFHFRGNRVTEVRVHIHPQGPAAQAAVDRLSAEARAGYGRGGGPPEGEPISEEQIRQFLRRFYEALDSGDADTAASLFHPGVTIHLWDGVTFTSREEFREWFERLFSTSKDAWREIKSLEVRGDTVEVHVQLHFTLN

SEQ ID NO: 539 - protein, 148 aa, synthetic construct
GQKHTVDLTHHFHFRGNRVTEVRVHINPTTGEEEREFVRELREELRELLELRLPPPPGGPMSEEQIRQFLRRFYEALDSGDADTAASLFHPGVTIHLWDGVTFTSREEFREWFERLFSTSKDAWREIKSLEVRGDTVEVHVQLHFTLN

SEQ ID NO: 540 - protein, 148 aa, synthetic construct
GQKHTVDLTHHFHFRGNRVTEVRVHIHPRDEASAAAVARLSALTRADGGGAAPVPPGGPPISEEQIRQFLRRFYEALDSGDADTAASLFHPGVTIHLWDGVTFTSREEFREWFERLFSTSKDAWREIKSLEVRGDTVEVHVQLHFTLN

SEQ ID NO: 541 - protein, 148 aa, synthetic construct
GQKHTVDLTHHFHFRGNRVTEVRVHIFPRDEASQAAVDRLSELTRETGAGAAPVPPGGPPISEEQIRQFLRRFYEALDSGDADTAASLFHPGVTIHLWDGVTFTSREEFREWFERLFSTSKDAWREIKSLEVRGDTVEVHVQLHFTLN

SEQ ID NO: 542 - protein, 148 aa, synthetic construct
GQKHTVDLTHHFHFRGNRVTEVRVHIEPRDEASRAAVERLSALIREDGAAAAPVPPGGPPISEEQIRQFLRRFYEALDSGDADTAASLFHPGVTIHLWDGVTFTSREEFREWFERLFSTSKDAWREIKSLEVRGDTVEVHVQLHFTLN

SEQ ID NO: 543 - protein, 148 aa, synthetic construct
GQKHTVDLTHHFHFRGNRVTEVRVHITPRDAASQAAVDRLRELTRADRGGAAPVPPGGPPISEEQIRQFLRRFYEALDSGDADTAASLFHPGVTIHLWDGVTFTSREEFREWFERLFSTSKDAWREIKSLEVRGDTVEVHVQLHFTLN

SEQ ID NO: 544 - protein, 148 aa, synthetic construct
GQKHTVDLTHHFHFRGNRVTEVRVHIAPRDEASAAAVARLSALIRETGGGAAPVPPGGPPISEEQIRQFLRRFYEALDSGDADTAASLFHPGVTIHLWDGVTFTSREEFREWFERLFSTSKDAWREIKSLEVRGDTVEVHVQLHFTLN

SEQ ID NO: 545 - protein, 148 aa, synthetic construct
GQKHTVDLTHHFHFRGNRVTEVRVHITPRDAASQAAVDRLSALIREDGGAAAPVPPGGPPISEEQIRQFLRRFYEALDSGDADTAASLFHPGVTIHLWDGVTFTSREEFREWFERLFSTSKDAWREIKSLEVRGDTVEVHVQLHFTLN

SEQ ID NO: 546 - protein, 148 aa, synthetic construct
GQKHTVDLTHHFHFRGNRVTEVRVHITPRDAASAAAVAALSALLREDGAAAAPVPPGGPPISEEQIRQFLRRFYEALDSGDADTAASLFHPGVTIHLWDGVTFTSREEFREWFERLFSTSKDAWREIKSLEVRGDTVEVHVQLHFTLN

SEQ ID NO: 547 - protein, 148 aa, synthetic construct
GQKHTVDLTHHFHFRGNRVTEVRVHITPQDEASREAVARLSALTREDGGGAAPVPPTGPPISEEQIRQFLRRFYEALDSGDADTAASLFHPGVTIHLWDGVTFTSREEFREWFERLFSTSKDAWREIKSLEVRGDTVEVHVQLHFTLN

SEQ ID NO: 548 - protein, 148 aa, synthetic construct
GQKHTVDLTHHFHFRGNRVTEVRVHITPRDAAAQEGVARLSALTREDGGAAAPVPPGGPPISEEQIRQFLRRFYEALDSGDADTAASLFHPGVTIHLWDGVTFTSREEFREWFERLFSTSKDAWREIKSLEVRGDTVEVHVQLHFTLN

SEQ ID NO: 549 - protein, 148 aa, synthetic construct
GQKHTVDLTHHFHFRGNRVTEVRVHIHPRDAESAEAVARLSALTRADGGAAAPTPPGGPPISEEQIRQFLRRFYEALDSGDADTAASLFHPGVTIHLWDGVTFTSREEFREWFERLFSTSKDAWREIKSLEVRGDTVEVHVQLHFTLN

SEQ ID NO: 550 - protein, 148 aa, synthetic construct
GQKHTVDLTHHFHFRGNRVTEVRVHIAPQDAASAEGVARLSALTREDGAGAAPTPPSGPPISEEQIRQFLRRFYEALDSGDADTAASLFHPGVTIHLWDGVTFTSREEFREWFERLFSTSKDAWREIKSLEVRGDTVEVHVQLHFTLN

SEQ ID NO: 551 - protein, 148 aa, synthetic construct
GQKHTVDLTHHFHFRGNRVTEVRVHIHPRDAASAAAVARLSALIREDGGGAAPVPPGGPPISEEQIRQFLRRFYEALDSGDADTAASLFHPGVTIHLWDGVTFTSREEFREWFERLFSTSKDAWREIKSLEVRGDTVEVHVQLHFTLN

SEQ ID NO: 552 - protein, 148 aa, synthetic construct
GQKHTVDLTHHFHFRGNRVTEVRVHITPRDAASQAAVDRLSALTRADGGAAAPTPPSGPPISEEQIRQFLRRFYEALDSGDADTAASLFHPGVTIHLWDGVTFTSREEFREWFERLFSTSKDAWREIKSLEVRGDTVEVHVQLHFTLN

SEQ ID NO: 553 - protein, 148 aa, synthetic construct
GQKHTVDLTHHFHFRGNRVTEVRVHIHPRDEASAEAVARLSALIREDGAAAAPVPPGGPPISEEQIRQFLRRFYEALDSGDADTAASLFHPGVTIHLWDGVTFTSREEFREWFERLFSTSKDAWREIKSLEVRGDTVEVHVQLHFTLN

SEQ ID NO: 554 - protein, 148 aa, synthetic construct
GQKHTVDLTHHFHFRGNRVTEVRVHIHPRDEASKAAVDRLSALVRADRGAAAPVPPGGPPISEEQIRQFLRRFYEALDSGDADTAASLFHPGVTIHLWDGVTFTSREEFREWFERLFSTSKDAWREIKSLEVRGDTVEVHVQLHFTLN

SEQ ID NO: 555 - protein, 148 aa, synthetic construct
GQKHTVDLTHHFHFRGNRVTEVRVHITPRDAASQAAVDRLSALTRETGGAAAPVPPGGPPISEEQIRQFLRRFYEALDSGDADTAASLFHPGVTIHLWDGVTFTSREEFREWFERLFSTSKDAWREIKSLEVRGDTVEVHVQLHFTLN

SEQ ID NO: 556 - protein, 148 aa, synthetic construct
GQKHTVDLTHHFHFRGNRVTEVRVHITPRDAASEAAVARLSELVRADRAGAGPVPPGGPPISEEQIRQFLRRFYEALDSGDADTAASLFHPGVTIHLWDGVTFTSREEFREWFERLFSTSKDAWREIKSLEVRGDTVEVHVQLHFTLN

SEQ ID NO: 557 - protein, 148 aa, synthetic construct
GQKHTVDLTHHFHFRGNRVTEVRVHITPRDAASQEAVDRLSALTRETGAGAAPVPPSGPPISEEQIRQFLRRFYEALDSGDADTAASLFHPGVTIHLWDGVTFTSREEFREWFERLFSTSKDAWREIKSLEVRGDTVEVHVQLHFTLN

SEQ ID NO: 558 - protein, 148 aa, synthetic construct
GQKHTVDLTHHFHFRGNRVTEVRVHITPRDEASQAAVDALSALLREDGGAAAPVPPGGPPISEEQIRQFLRRFYEALDSGDADTAASLFHPGVTIHLWDGVTFTSREEFREWFERLFSTSKDAWREIKSLEVRGDTVEVHVQLHFTLN

SEQ ID NO: 559 - protein, 148 aa, synthetic construct
GQKHTVDLTHHFHFRGNRVTEVRVHITPRDAASQAAVDRLSALVREDGAGAAPVPPGGPPISEEQIRQFLRRFYEALDSGDADTAASLFHPGVTIHLWDGVTFTSREEFREWFERLFSTSKDAWREIKSLEVRGDTVEVHVQLHFTLN

SEQ ID NO: 560 - protein, 149 aa, synthetic construct
GQKHTVDLTHHFHFRGNRVTEVRVHINPTTGEEEREFVRELRAELRALLLLLLLLLEPPPPMSEEQIRQFLRRFYEALDSGDADTAASLFHPGVTIHLWDGVTFTSREEFREWFERLFSTSKDAWREIKSLEVRGDTVEVHVQLHFTLN

SEQ ID NO: 561 - protein, 149 aa, synthetic construct
GQKHTVDLTHHFHFRGNRVTEVRVHITPLSEAAAAGVAKMSAIAGADGAGAAPGAETPEPLVSEEQIRQFLRRFYEALDSGDADTAASLFHPGVTIHLWDGVTFTSREEFREWFERLFSTSKDAWREIKSLEVRGDTVEVHVQLHFTLN

SEQ ID NO: 562 - protein, 149 aa, synthetic construct
GQKHTVDLTHHFHFRGNRVTEVRVHITPKSEAAAEGVKKMSEIAGEEGKGAEPGAESPEPLVSEEQIRQFLRRFYEALDSGDADTAASLFHPGVTIHLWDGVTFTSREEFREWFERLFSTSKDAWREIKSLEVRGDTVEVHVQLHFTLN

SEQ ID NO: 563 - protein, 149 aa, synthetic construct
GQKHTVDLTHHFHFRGNRVTEVRVHITPQSEAAQAGVQRMLAIGGADGGSAEPGAEAPEPLVSEEQIRQFLRRFYEALDSGDADTAASLFHPGVTIHLWDGVTFTSREEFREWFERLFSTSKDAWREIKSLEVRGDTVEVHVQLHFTLN

SEQ ID NO: 564 - protein, 149 aa, synthetic construct
GQKHTVDLTHHFHFRGNRVTEVRVHITPLSEAAKAGVEKISALLGADLAGAEPGAELPEPLVSEEQIRQFLRRFYEALDSGDADTAASLFHPGVTIHLWDGVTFTSREEFREWFERLFSTSKDAWREIKSLEVRGDTVEVHVQLHFTLN

SEQ ID NO: 565 - protein, 149 aa, synthetic construct
GQKHTVDLTHHFHFRGNRVTEVRVHITPRSAAAQAGVDKIAAIGGAEGASAEPAAEPPEPLVSEEQIRQFLRRFYEALDSGDADTAASLFHPGVTIHLWDGVTFTSREEFREWFERLFSTSKDAWREIKSLEVRGDTVEVHVQLHFTLN

SEQ ID NO: 566 - protein, 149 aa, synthetic construct
GQKHTVDLTHHFHFRGNRVTEVRVHITPRSEAAKAGVDKISAIAGAELGSAEPGAEPEEPLVSEEQIRQFLRRFYEALDSGDADTAASLFHPGVTIHLWDGVTFTSREEFREWFERLFSTSKDAWREIKSLEVRGDTVEVHVQLHFTLN

SEQ ID NO: 567 - protein, 149 aa, synthetic construct
GQKHTVDLTHHFHFRGNRVTEVRVHITPLSEAAQEGVARMSAIAGEDLASSEPEAEPPEPLVSEEQIRQFLRRFYEALDSGDADTAASLFHPGVTIHLWDGVTFTSREEFREWFERLFSTSKDAWREIKSLEVRGDTVEVHVQLHFTLN

SEQ ID NO: 568 - protein, 149 aa, synthetic construct
GQKHTVDLTHHFHFRGNRVTEVRVHITPLSEAAQEGVKKMSEILGADGRGAAPAAEPPEPLVSEEQIRQFLRRFYEALDSGDADTAASLFHPGVTIHLWDGVTFTSREEFREWFERLFSTSKDAWREIKSLEVRGDTVEVHVQLHFTLN

SEQ ID NO: 569 - protein, 149 aa, synthetic construct
GQKHTVDLTHHFHFRGNRVTEVRVHITPRSEAAKAGVAKLSEIAGADGASSEPEAEPPEPLVSEEQIRQFLRRFYEALDSGDADTAASLFHPGVTIHLWDGVTFTSREEFREWFERLFSTSKDAWREIKSLEVRGDTVEVHVQLHFTLN

SEQ ID NO: 570 - protein, 149 aa, synthetic construct
GQKHTVDLTHHFHFRGNRVTEVRVHITPRSEAAQAGVDKILAIAGAELGSSAPEAEPPEPLVSEEQIRQFLRRFYEALDSGDADTAASLFHPGVTIHLWDGVTFTSREEFREWFERLFSTSKDAWREIKSLEVRGDTVEVHVQLHFTLN

SEQ ID NO: 571 - protein, 149 aa, synthetic construct
GQKHTVDLTHHFHFRGNRVTEVRVHITPQSAAAQAGVDRMSAIAGADLRGAEPGAESPSPLMSEEQIRQFLRRFYEALDSGDADTAASLFHPGVTIHLWDGVTFTSREEFREWFERLFSTSKDAWREIKSLEVRGDTVEVHVQLHFTLN

SEQ ID NO: 572 - protein, 149 aa, synthetic construct
GQKHTVDLTHHFHFRGNRVTEVRVHITPRSEAAQAGVDKISAIAGEELGSSAPGAAAPAPLVSEEQIRQFLRRFYEALDSGDADTAASLFHPGVTIHLWDGVTFTSREEFREWFERLFSTSKDAWREIKSLEVRGDTVEVHVQLHFTLN

SEQ ID NO: 573 - protein, 149 aa, synthetic construct
GQKHTVDLTHHFHFRGNRVTEVRVHITPQSAAAAAGVAKISEIARADLASAEPGAETPEPLMSEEQIRQFLRRFYEALDSGDADTAASLFHPGVTIHLWDGVTFTSREEFREWFERLFSTSKDAWREIKSLEVRGDTVEVHVQLHFTLN

SEQ ID NO: 574 - protein, 149 aa, synthetic construct
GQKHTVDLTHHFHFRGNRVTEVRVHITPRSAAAQAGVDRIAALGGAEGAGSEPEAEAPEPLVSEEQIRQFLRRFYEALDSGDADTAASLFHPGVTIHLWDGVTFTSREEFREWFERLFSTSKDAWREIKSLEVRGDTVEVHVQLHFTLN

SEQ ID NO: 575 - protein, 149 aa, synthetic construct
GQKHTVDLTHHFHFRGNRVTEVRVHITPRSAAAQAGVERISAIAGADGRGSEPEVELPEPLMSEEQIRQFLRRFYEALDSGDADTAASLFHPGVTIHLWDGVTFTSREEFREWFERLFSTSKDAWREIKSLEVRGDTVEVHVQLHFTLN

SEQ ID NO: 576 - protein, 149 aa, synthetic construct
GQKHTVDLTHHFHFRGNRVTEVRVHIEPLSEAAQAGVDRMLAILGAEGGSSEPEAEPEEPLMSEEQIRQFLRRFYEALDSGDADTAASLFHPGVTIHLWDGVTFTSREEFREWFERLFSTSKDAWREIKSLEVRGDTVEVHVQLHFTLN

SEQ ID NO: 577 - protein, 149 aa, synthetic construct
GQKHTVDLTHHFHFRGNRVTEVRVHITPQSAAAQEGVARISAIGGASGGSSAPEAEPPEPLVSEEQIRQFLRRFYEALDSGDADTAASLFHPGVTIHLWDGVTFTSREEFREWFERLFSTSKDAWREIKSLEVRGDTVEVHVQLHFTLN

SEQ ID NO: 578 - protein, 149 aa, synthetic construct
GQKHTVDLTHHFHFRGNRVTEVRVHITPRSAAAQAGVDRISAILGEQLAGAEPEAEAPEPLVSEEQIRQFLRRFYEALDSGDADTAASLFHPGVTIHLWDGVTFTSREEFREWFERLFSTSKDAWREIKSLEVRGDTVEVHVQLHFTLN

SEQ ID NO: 579 - protein, 149 aa, synthetic construct
GQKHTVDLTHHFHFRGNRVTEVRVHITPQSAAAQAGVERISAIGRADGRGAEPEAEPPEPLVSEEQIRQFLRRFYEALDSGDADTAASLFHPGVTIHLWDGVTFTSREEFREWFERLFSTSKDAWREIKSLEVRGDTVEVHVQLHFTLN

SEQ ID NO: 580 - protein, 149 aa, synthetic construct
GQKHTVDLTHHFHFRGNRVTEVRVHITPRSAAAQAGVAQMSAIGGAAGAGAEPEVELPEPLVSEEQIRQFLRRFYEALDSGDADTAASLFHPGVTIHLWDGVTFTSREEFREWFERLFSTSKDAWREIKSLEVRGDTVEVHVQLHFTLN

SEQ ID NO: 581 - protein, 150 aa, synthetic construct
GQKHTVDLTHHFHFRGNRVTEVRVHINPTTGEEEREFVRELRRELRELLLELLLLEPEGGGPMSEEQIRQFLRRFYEALDSGDADTAASLFHPGVTIHLWDGVTFTSREEFREWFERLFSTSKDAWREIKSLEVRGDTVEVHVQLHFTLN

SEQ ID NO: 582 - protein, 150 aa, synthetic construct
GQKHTVDLTHHFHFRGNRVTEVRVHIFPRDEESQAAVEALRKESREWAGGREYVPPTGGGPPISEEQIRQFLRRFYEALDSGDADTAASLFHPGVTIHLWDGVTFTSREEFREWFERLFSTSKDAWREIKSLEVRGDTVEVHVQLHFTLN

SEQ ID NO: 583 - protein, 150 aa, synthetic construct
GQKHTVDLTHHFHFRGNRVTEVRVHIYPTDEASQAAVDRLRAEGRAWAAGRTYTPLTGGGPPMSEEQIRQFLRRFYEALDSGDADTAASLFHPGVTIHLWDGVTFTSREEFREWFERLFSTSKDAWREIKSLEVRGDTVEVHVQLHFTLN

SEQ ID NO: 584 - protein, 150 aa, synthetic construct
GQKHTVDLTHHFHFRGNRVTEVRVHIHPRDAASQAAVDRLLAESRAFASGRTYTPLTGGGPPISEEQIRQFLRRFYEALDSGDADTAASLFHPGVTIHLWDGVTFTSREEFREWFERLFSTSKDAWREIKSLEVRGDTVEVHVQLHFTLN

SEQ ID NO: 585 - protein, 150 aa, synthetic construct
GQKHTVDLTHHFHFRGNRVTEVRVHIHPRDAASQAAVDRLAAESRAWAAGRTYVPLTGGGPPISEEQIRQFLRRFYEALDSGDADTAASLFHPGVTIHLWDGVTFTSREEFREWFERLFSTSKDAWREIKSLEVRGDTVEVHVQLHFTLN

SEQ ID NO: 586 - protein, 150 aa, synthetic construct
GQKHTVDLTHHFHFRGNRVTEVRVHIHPRDEASQAAVDRLREESRAAAGGREYTPLSGGGPPMSEEQIRQFLRRFYEALDSGDADTAASLFHPGVTIHLWDGVTFTSREEFREWFERLFSTSKDAWREIKSLEVRGDTVEVHVQLHFTLN

SEQ ID NO: 587 - protein, 150 aa, synthetic construct
GQKHTVDLTHHFHFRGNRVTEVRVHIHPRDAASQAAVDRLREEHRAAAGGRAYTPLTGGGPPMSEEQIRQFLRRFYEALDSGDADTAASLFHPGVTIHLWDGVTFTSREEFREWFERLFSTSKDAWREIKSLEVRGDTVEVHVQLHFTLN

SEQ ID NO: 588 - protein, 150 aa, synthetic construct
GQKHTVDLTHHFHFRGNRVTEVRVHIHPRDEASQQAVDALSAEFRAAAGGRTYTPLTGGGPPISEEQIRQFLRRFYEALDSGDADTAASLFHPGVTIHLWDGVTFTSREEFREWFERLFSTSKDAWREIKSLEVRGDTVEVHVQLHFTLN

SEQ ID NO: 589 - protein, 150 aa, synthetic construct
GQKHTVDLTHHFHFRGNRVTEVRVHIHPTDAESQAAVDRLREESRAWAAGRTYVPLTGGGPPISEEQIRQFLRRFYEALDSGDADTAASLFHPGVTIHLWDGVTFTSREEFREWFERLFSTSKDAWREIKSLEVRGDTVEVHVQLHFTLN

SEQ ID NO: 590 - protein, 150 aa, synthetic construct
GQKHTVDLTHHFHFRGNRVTEVRVHIHPTDEASQAAVDALAAEGRAWAAGRTYTPLTGGGPPMSEEQIRQFLRRFYEALDSGDADTAASLFHPGVTIHLWDGVTFTSREEFREWFERLFSTSKDAWREIKSLEVRGDTVEVHVQLHFTLN

SEQ ID NO: 591 - protein, 150 aa, synthetic construct
GQKHTVDLTHHFHFRGNRVTEVRVHIHPTDAASQAAVDALRERSRAWAAGREYTPLTGGGPPMSEEQIRQFLRRFYEALDSGDADTAASLFHPGVTIHLWDGVTFTSREEFREWFERLFSTSKDAWREIKSLEVRGDTVEVHVQLHFTLN

SEQ ID NO: 592 - protein, 150 aa, synthetic construct
GQKHTVDLTHHFHFRGNRVTEVRVHIHPRDAASQEAVDRLRKESRAWASGREYTPLSGGGPPMSEEQIRQFLRRFYEALDSGDADTAASLFHPGVTIHLWDGVTFTSREEFREWFERLFSTSKDAWREIKSLEVRGDTVEVHVQLHFTLN

SEQ ID NO: 593 - protein, 150 aa, synthetic construct
GQKHTVDLTHHFHFRGNRVTEVRVHIHPTDAASQAAVDALAAESRAFAAGRTYTPLTGGGPPISEEQIRQFLRRFYEALDSGDADTAASLFHPGVTIHLWDGVTFTSREEFREWFERLFSTSKDAWREIKSLEVRGDTVEVHVQLHFTLN

SEQ ID NO: 594 - protein, 150 aa, synthetic construct
GQKHTVDLTHHFHFRGNRVTEVRVHIHPRDAASQAAVDRLAAESRAWAEGREYTPLEGGGPPMSEEQIRQFLRRFYEALDSGDADTAASLFHPGVTIHLWDGVTFTSREEFREWFERLFSTSKDAWREIKSLEVRGDTVEVHVQLHFTLN

SEQ ID NO: 595 - protein, 150 aa, synthetic construct
GQKHTVDLTHHFHFRGNRVTEVRVHIFPRDEASQEAVDRLLEESRAWFAGRTYTPLTGGGPPMSEEQIRQFLRRFYEALDSGDADTAASLFHPGVTIHLWDGVTFTSREEFREWFERLFSTSKDAWREIKSLEVRGDTVEVHVQLHFTLN

SEQ ID NO: 596 - protein, 150 aa, synthetic construct
GQKHTVDLTHHFHFRGNRVTEVRVHIHPRDAASQEAVDRLAAESRAFAAGRTYRPLTGGGPPISEEQIRQFLRRFYEALDSGDADTAASLFHPGVTIHLWDGVTFTSREEFREWFERLFSTSKDAWREIKSLEVRGDTVEVHVQLHFTLN

SEQ ID NO: 597 - protein, 150 aa, synthetic construct
GQKHTVDLTHHFHFRGNRVTEVRVHIHPRDAASQAAVDALRARGRAFAGGRTYTPLTGGGPPISEEQIRQFLRRFYEALDSGDADTAASLFHPGVTIHLWDGVTFTSREEFREWFERLFSTSKDAWREIKSLEVRGDTVEVHVQLHFTLN

SEQ ID NO: 598 - protein, 150 aa, synthetic construct
GQKHTVDLTHHFHFRGNRVTEVRVHIHPTDAASQAAVDALRAESRAWAGGREYTPLTGGGPPMSEEQIRQFLRRFYEALDSGDADTAASLFHPGVTIHLWDGVTFTSREEFREWFERLFSTSKDAWREIKSLEVRGDTVEVHVQLHFTLN

SEQ ID NO: 599 - protein, 150 aa, synthetic construct
GQKHTVDLTHHFHFRGNRVTEVRVHIHPTDAASQAAVDRLSEEARAAAAGREYTPLTGGGPPISEEQIRQFLRRFYEALDSGDADTAASLFHPGVTIHLWDGVTFTSREEFREWFERLFSTSKDAWREIKSLEVRGDTVEVHVQLHFTLN

SEQ ID NO: 600 - protein, 150 aa, synthetic construct
GQKHTVDLTHHFHFRGNRVTEVRVHIHPRDAASQAAVDALRAASRAWASGRTYTPLTGGGPPISEEQIRQFLRRFYEALDSGDADTAASLFHPGVTIHLWDGVTFTSREEFREWFERLFSTSKDAWREIKSLEVRGDTVEVHVQLHFTLN

SEQ ID NO: 601 - protein, 150 aa, synthetic construct
GQKHTVDLTHHFHFRGNRVTEVRVHIHPRDAASQAAVDRLRAESRAFAGRRTHRPLTGGGPPMSEEQIRQFLRRFYEALDSGDADTAASLFHPGVTIHLWDGVTFTSREEFREWFERLFSTSKDAWREIKSLEVRGDTVEVHVQLHFTLN

SEQ ID NO: 602 - protein, 151 aa, synthetic construct
GQKHTVDLTHHFHFRGNRVTEVRVHINPTTGEEEREFVRELREELRELLLLLRLLLLLEPEPPMSEEQIRQFLRRFYEALDSGDADTAASLFHPGVTIHLWDGVTFTSREEFREWFERLFSTSKDAWREIKSLEVRGDTVEVHVQLHFTLN

SEQ ID NO: 603 - protein, 151 aa, synthetic construct
GQKHTVDLTHHFHFRGNRVTEVRVHITPQSEAAAAGVAKLSALGRAFAAALPPGAEFVHPSEPVSEEQIRQFLRRFYEALDSGDADTAASLFHPGVTIHLWDGVTFTSREEFREWFERLFSTSKDAWREIKSLEVRGDTVEVHVQLHFTLN

SEQ ID NO: 604 - protein, 151 aa, synthetic construct
GQKHTVDLTHHFHFRGNRVTEVRVHITPQSPAAQEGVEQLSALGRAFAAELAPGAEFVHPGEPVSEEQIRQFLRRFYEALDSGDADTAASLFHPGVTIHLWDGVTFTSREEFREWFERLFSTSKDAWREIKSLEVRGDTVEVHVQLHFTLN

SEQ ID NO: 605 - protein, 151 aa, synthetic construct
GQKHTVDLTHHFHFRGNRVTEVRVHITPRSPAAQAGVDYLSELGRAFAAELGEGAEFVHESEPVSEEQIRQFLRRFYEALDSGDADTAASLFHPGVTIHLWDGVTFTSREEFREWFERLFSTSKDAWREIKSLEVRGDTVEVHVQLHFTLN

SEQ ID NO: 606 - protein, 151 aa, synthetic construct
GQKHTVDLTHHFHFRGNRVTEVRVHITPQSPAAQEGVDYLSQLGLEFASALPAGAEFVHPSEPVSEEQIRQFLRRFYEALDSGDADTAASLFHPGVTIHLWDGVTFTSREEFREWFERLFSTSKDAWREIKSLEVRGDTVEVHVQLHFTLN

SEQ ID NO: 607 - protein, 151 aa, synthetic construct
GQKHTVDLTHHFHFRGNRVTEVRVHITPRSPEAQKGVEHLSAIGRAFAAALPEGAEFVHPSEPVSEEQIRQFLRRFYEALDSGDADTAASLFHPGVTIHLWDGVTFTSREEFREWFERLFSTSKDAWREIKSLEVRGDTVEVHVQLHFTLN

SEQ ID NO: 608 - protein, 151 aa, synthetic construct
GQKHTVDLTHHFHFRGNRVTEVRVHITPQSPEAQEGVEKLSALGRAFAAERGAGAEFVHPSEPVSEEQIRQFLRRFYEALDSGDADTAASLFHPGVTIHLWDGVTFTSREEFREWFERLFSTSKDAWREIKSLEVRGDTVEVHVQLHFTLN

SEQ ID NO: 609 - protein, 151 aa, synthetic construct
GQKHTVDLTHHFHFRGNRVTEVRVHITPQSAAAAAGVAQLSALGRAFAAALPDGWEFVHPSEPVSEEQIRQFLRRFYEALDSGDADTAASLFHPGVTIHLWDGVTFTSREEFREWFERLFSTSKDAWREIKSLEVRGDTVEVHVQLHFTLN

SEQ ID NO: 610 - protein, 151 aa, synthetic construct
GQKHTVDLTHHFHFRGNRVTEVRVHITPQSPAAQAGVDQLSALGRAFAAALPAGAEFVHPEEPVSEEQIRQFLRRFYEALDSGDADTAASLFHPGVTIHLWDGVTFTSREEFREWFERLFSTSKDAWREIKSLEVRGDTVEVHVQLHFTLN

SEQ ID NO: 611 - protein, 151 aa, synthetic construct
GQKHTVDLTHHFHFRGNRVTEVRVHITPQSEAAKAGVDKLSALGREFAGRLGEGFEFVHPSEPVSEEQIRQFLRRFYEALDSGDADTAASLFHPGVTIHLWDGVTFTSREEFREWFERLFSTSKDAWREIKSLEVRGDTVEVHVQLHFTLN

SEQ ID NO: 612 - protein, 151 aa, synthetic construct
GQKHTVDLTHHFHFRGNRVTEVRVHITPQSEAAKEGVDKLSALGREFAGALPEGAEFVHPEEPVSEEQIRQFLRRFYEALDSGDADTAASLFHPGVTIHLWDGVTFTSREEFREWFERLFSTSKDAWREIKSLEVRGDTVEVHVQLHFTLN

SEQ ID NO: 613 - protein, 151 aa, synthetic construct
GQKHTVDLTHHFHFRGNRVTEVRVHITPRSAAAAEGVARLSALGREFAAALPEGAEFVHPSEPVSEEQIRQFLRRFYEALDSGDADTAASLFHPGVTIHLWDGVTFTSREEFREWFERLFSTSKDAWREIKSLEVRGDTVEVHVQLHFTLN

SEQ ID NO: 614 - protein, 151 aa, synthetic construct
GQKHTVDLTHHFHFRGNRVTEVRVHITPQSPAAQEGVDRLSALGRAFAAALPEGAEFVHPEEPVSEEQIRQFLRRFYEALDSGDADTAASLFHPGVTIHLWDGVTFTSREEFREWFERLFSTSKDAWREIKSLEVRGDTVEVHVQLHFTLN

SEQ ID NO: 615 - protein, 151 aa, synthetic construct
GQKHTVDLTHHFHFRGNRVTEVRVHITPQSEAAKAGVAQLSELGRAFAAALPPGAEFVHPSEPVSEEQIRQFLRRFYEALDSGDADTAASLFHPGVTIHLWDGVTFTSREEFREWFERLFSTSKDAWREIKSLEVRGDTVEVHVQLHFTLN

SEQ ID NO: 616 - protein, 151 aa, synthetic construct
GQKHTVDLTHHFHFRGNRVTEVRVHITPRSPAAQEGVDRLSALGREFAAELPEGYEFVHPSEPVSEEQIRQFLRRFYEALDSGDADTAASLFHPGVTIHLWDGVTFTSREEFREWFERLFSTSKDAWREIKSLEVRGDTVEVHVQLHFTLN

SEQ ID NO: 617 - protein, 151 aa, synthetic construct
GQKHTVDLTHHFHFRGNRVTEVRVHITPRSEAAQAGVQKLSELGLAFAGELPEGAEFVHPSEPVSEEQIRQFLRRFYEALDSGDADTAASLFHPGVTIHLWDGVTFTSREEFREWFERLFSTSKDAWREIKSLEVRGDTVEVHVQLHFTLN

SEQ ID NO: 618 - protein, 151 aa, synthetic construct
GQKHTVDLTHHFHFRGNRVTEVRVHITPQSAEAQAGVDKLSALGRAFAAALPAGAEFVHPSEPISEEQIRQFLRRFYEALDSGDADTAASLFHPGVTIHLWDGVTFTSREEFREWFERLFSTSKDAWREIKSLEVRGDTVEVHVQLHFTLN

SEQ ID NO: 619 - protein, 151 aa, synthetic construct
GQKHTVDLTHHFHFRGNRVTEVRVHITPRSAAAQAGVERLSALGREFAARLPAGAEFVHPSEPVSEEQIRQFLRRFYEALDSGDADTAASLFHPGVTIHLWDGVTFTSREEFREWFERLFSTSKDAWREIKSLEVRGDTVEVHVQLHFTLN

SEQ ID NO: 620 - protein, 151 aa, synthetic construct
GQKHTVDLTHHFHFRGNRVTEVRVHITPQSPEAAAGVAQLSELGRAFAAELPAGARFVHPGEPVSEEQIRQFLRRFYEALDSGDADTAASLFHPGVTIHLWDGVTFTSREEFREWFERLFSTSKDAWREIKSLEVRGDTVEVHVQLHFTLN

SEQ ID NO: 621 - protein, 151 aa, synthetic construct
GQKHTVDLTHHFHFRGNRVTEVRVHITPRSPEAQAGVERLSALGREFAAALPEGYEFVHPEEPVSEEQIRQFLRRFYEALDSGDADTAASLFHPGVTIHLWDGVTFTSREEFREWFERLFSTSKDAWREIKSLEVRGDTVEVHVQLHFTLN

SEQ ID NO: 622 - protein, 151 aa, synthetic construct
GQKHTVDLTHHFHFRGNRVTEVRVHITPQSEEAQKGVDYLSALGREFAAELAEGYEFVHPSEPVSEEQIRQFLRRFYEALDSGDADTAASLFHPGVTIHLWDGVTFTSREEFREWFERLFSTSKDAWREIKSLEVRGDTVEVHVQLHFTLN

SEQ ID NO: 623 - protein, 152 aa, synthetic construct
GQKHTVDLTHHFHFRGNRVTEVRVHINPTTGEEEREFVRELREELRELLLLLLLELLLPEPPGPMSEEQIRQFLRRFYEALDSGDADTAASLFHPGVTIHLWDGVTFTSREEFREWFERLFSTSKDAWREIKSLEVRGDTVEVHVQLHFTLN

SEQ ID NO: 624 - protein, 152 aa, synthetic construct
GQKHTVDLTHHFHFRGNRVTEVRVHIFPTDEASRAAVERLSAEGRALAGALREPRSLPVEGTEPITEEQIRQFLRRFYEALDSGDADTAASLFHPGVTIHLWDGVTFTSREEFREWFERLFSTSKDAWREIKSLEVRGDTVEVHVQLHFTLN

SEQ ID NO: 625 - protein, 152 aa, synthetic construct
GQKHTVDLTHHFHFRGNRVTEVRVHIAPRDEASQQAVDELSARGRELAGALREPASRPVPETEPISEEQIRQFLRRFYEALDSGDADTAASLFHPGVTIHLWDGVTFTSREEFREWFERLFSTSKDAWREIKSLEVRGDTVEVHVQLHFTLN

SEQ ID NO: 626 - protein, 152 aa, synthetic construct
GQKHTVDLTHHFHFRGNRVTEVRVHIHPTDAASQAAVDRLSALGREHAGALREPRWRPVEDTEPISEEQIRQFLRRFYEALDSGDADTAASLFHPGVTIHLWDGVTFTSREEFREWFERLFSTSKDAWREIKSLEVRGDTVEVHVQLHFTLN

SEQ ID NO: 627 - protein, 152 aa, synthetic construct
GQKHTVDLTHHFHFRGNRVTEVRVHIAPTGPAAQAAVERLLALGRELAGALREPAWRPVPETEPISEEQIRQFLRRFYEALDSGDADTAASLFHPGVTIHLWDGVTFTSREEFREWFERLFSTSKDAWREIKSLEVRGDTVEVHVQLHFTLN

SEQ ID NO: 628 - protein, 152 aa, synthetic construct
GQKHTVDLTHHFHFRGNRVTEVRVHIYPRDAASQQAVDQLSALGRELAGALREPRWRPVPGTEPISEEQIRQFLRRFYEALDSGDADTAASLFHPGVTIHLWDGVTFTSREEFREWFERLFSTSKDAWREIKSLEVRGDTVEVHVQLHFTLN

SEQ ID NO: 629 - protein, 152 aa, synthetic construct
GQKHTVDLTHHFHFRGNRVTEVRVHIHPRDEASRQAVAELSAKGRELAGELREPRWRPVEGTEPISEEQIRQFLRRFYEALDSGDADTAASLFHPGVTIHLWDGVTFTSREEFREWFERLFSTSKDAWREIKSLEVRGDTVEVHVQLHFTLN

SEQ ID NO: 630 - protein, 152 aa, synthetic construct
GQKHTVDLTHHFHFRGNRVTEVRVHIAPRDAAAAAAVARLSAEGRALAGALTAPATRPVTGTEPISEEQIRQFLRRFYEALDSGDADTAASLFHPGVTIHLWDGVTFTSREEFREWFERLFSTSKDAWREIKSLEVRGDTVEVHVQLHFTLN

SEQ ID NO: 631 - protein, 152 aa, synthetic construct
GQKHTVDLTHHFHFRGNRVTEVRVHIYPTDEAAQAAVERLSALGRELAGALRRPESRPVEGTEPISEEQIRQFLRRFYEALDSGDADTAASLFHPGVTIHLWDGVTFTSREEFREWFERLFSTSKDAWREIKSLEVRGDTVEVHVQLHFTLN

SEQ ID NO: 632 - protein, 152 aa, synthetic construct
GQKHTVDLTHHFHFRGNRVTEVRVHIAPTDEAAKAAVDALSAEGRALAGALAAPRTRPVAGTEPISEEQIRQFLRRFYEALDSGDADTAASLFHPGVTIHLWDGVTFTSREEFREWFERLFSTSKDAWREIKSLEVRGDTVEVHVQLHFTLN

SEQ ID NO: 633 - protein, 152 aa, synthetic construct
GQKHTVDLTHHFHFRGNRVTEVRVHIYPTDAASQQAVDQLLEEGRALAGALREPRTLPVPSTEPISEEQIRQFLRRFYEALDSGDADTAASLFHPGVTIHLWDGVTFTSREEFREWFERLFSTSKDAWREIKSLEVRGDTVEVHVQLHFTLN

SEQ ID NO: 634 - protein, 152 aa, synthetic construct
GQKHTVDLTHHFHFRGNRVTEVRVHIHPTDAAAAEAVARLSAKGRELAGALREPAWRPVEGTEPISEEQIRQFLRRFYEALDSGDADTAASLFHPGVTIHLWDGVTFTSREEFREWFERLFSTSKDAWREIKSLEVRGDTVEVHVQLHFTLN

SEQ ID NO: 635 - protein, 152 aa, synthetic construct
GQKHTVDLTHHFHFRGNRVTEVRVHIFPQDEASQKAVDELLAEGRALAGALRAPLSRPVPETEPISEEQIRQFLRRFYEALDSGDADTAASLFHPGVTIHLWDGVTFTSREEFREWFERLFSTSKDAWREIKSLEVRGDTVEVHVQLHFTLN

SEQ ID NO: 636 - protein, 152 aa, synthetic construct
GQKHTVDLTHHFHFRGNRVTEVRVHITPRDAASEEAVARLSALGRELAGELRRPDWRPVEGTEPISEEQIRQFLRRFYEALDSGDADTAASLFHPGVTIHLWDGVTFTSREEFREWFERLFSTSKDAWREIKSLEVRGDTVEVHVQLHFTLN

SEQ ID NO: 637 - protein, 152 aa, synthetic construct
GQKHTVDLTHHFHFRGNRVTEVRVHIYPRDAASQEAVDRLSALGRELAGELAEPATRPVPETEPISEEQIRQFLRRFYEALDSGDADTAASLFHPGVTIHLWDGVTFTSREEFREWFERLFSTSKDAWREIKSLEVRGDTVEVHVQLHFTLN

SEQ ID NO: 638 - protein, 152 aa, synthetic construct
GQKHTVDLTHHFHFRGNRVTEVRVHIAPTDEASKAAVQALSEKGRELAGELREPASRPVTDTEPISEEQIRQFLRRFYEALDSGDADTAASLFHPGVTIHLWDGVTFTSREEFREWFERLFSTSKDAWREIKSLEVRGDTVEVHVQLHFTLN

SEQ ID NO: 639 - protein, 152 aa, synthetic construct
GQKHTVDLTHHFHFRGNRVTEVRVHIHPRDEASQAAVDELSAAGRALAGALAAPATRPVPGTEPISEEQIRQFLRRFYEALDSGDADTAASLFHPGVTIHLWDGVTFTSREEFREWFERLFSTSKDAWREIKSLEVRGDTVEVHVQLHFTLN

SEQ ID NO: 640 - protein, 152 aa, synthetic construct
GQKHTVDLTHHFHFRGNRVTEVRVHIHPTGPAAEEAVKRLSEEGRALAGELREPASRPVTGTEPISEEQIRQFLRRFYEALDSGDADTAASLFHPGVTIHLWDGVTFTSREEFREWFERLFSTSKDAWREIKSLEVRGDTVEVHVQLHFTLN

SEQ ID NO: 641 - protein, 152 aa, synthetic construct
GQKHTVDLTHHFHFRGNRVTEVRVHIYPTDEASKKAVDELLAKGRELAGELTEPRWRPVAGTEPISEEQIRQFLRRFYEALDSGDADTAASLFHPGVTIHLWDGVTFTSREEFREWFERLFSTSKDAWREIKSLEVRGDTVEVHVQLHFTLN

SEQ ID NO: 642 - protein, 152 aa, synthetic construct
GQKHTVDLTHHFHFRGNRVTEVRVHIFPTDEASKAAVDKLSEIGRALAGELRAPAWRPVTDTEPISEEQIRQFLRRFYEALDSGDADTAASLFHPGVTIHLWDGVTFTSREEFREWFERLFSTSKDAWREIKSLEVRGDTVEVHVQLHFTLN

SEQ ID NO: 643 - protein, 152 aa, synthetic construct
GQKHTVDLTHHFHFRGNRVTEVRVHIFPTDEAAQAAVDRLSALGRELAGALAEPRLRPVPETEPISEEQIRQFLRRFYEALDSGDADTAASLFHPGVTIHLWDGVTFTSREEFREWFERLFSTSKDAWREIKSLEVRGDTVEVHVQLHFTLN

SEQ ID NO: 644 - protein, 153 aa, synthetic construct
GQKHTVDLTHHFHFRGNRVTEVRVHINPTTDGPPELLLLLLLLLLELLLLLLLLLEELPPRPGPGMSEEQIRQFLRRFYEALDSGDADTAASLFHPGVTIHLWDGVTFTSREEFREWFERLFSTSKDAWREIKSLEVRGDTVEVHVQLHFTLN

SEQ ID NO: 645 - protein, 153 aa, synthetic construct
GQKHTVDLTHHFHFRGNRVTEVRVHIEPLTPVGEVAEKDPGLFKGLGGGGARPRLAYAPRAGPGSISEEQIRQFLRRFYEALDSGDADTAASLFHPGVTIHLWDGVTFTSREEFREWFERLFSTSKDAWREIKSLEVRGDTVEVHVQLHFTLN

SEQ ID NO: 646 - protein, 153 aa, synthetic construct
GQKHTVDLTHHFHFRGNRVTEVRVHINPLTPVGPVAEKDAPLFAGLGGGGARPREAYAPRAGPGEISEEQIRQFLRRFYEALDSGDADTAASLFHPGVTIHLWDGVTFTSREEFREWFERLFSTSKDAWREIKSLEVRGDTVEVHVQLHFTLN

SEQ ID NO: 647 - protein, 153 aa, synthetic construct
GQKHTVDLTHHFHFRGNRVTEVRVHINPLTPVGEVAERDRGLFKGLGGGGANPREAFAPRAGPGSISEEQIRQFLRRFYEALDSGDADTAASLFHPGVTIHLWDGVTFTSREEFREWFERLFSTSKDAWREIKSLEVRGDTVEVHVQLHFTLN

SEQ ID NO: 648 - protein, 153 aa, synthetic construct
GQKHTVDLTHHFHFRGNRVTEVRVHINPVTPVGEVAEKDAPLFKGLGGGGARPREAFPPRPGPGSISEEQIRQFLRRFYEALDSGDADTAASLFHPGVTIHLWDGVTFTSREEFREWFERLFSTSKDAWREIKSLEVRGDTVEVHVQLHFTLN

SEQ ID NO: 649 - protein, 153 aa, synthetic construct
GQKHTVDLTHHFHFRGNRVTEVRVHIHPVTPVGEVAERDRPLFAGLGGGGAAPREVFPPRAGPGSISEEQIRQFLRRFYEALDSGDADTAASLFHPGVTIHLWDGVTFTSREEFREWFERLFSTSKDAWREIKSLEVRGDTVEVHVQLHFTLN

SEQ ID NO: 650 - protein, 153 aa, synthetic construct
GQKHTVDLTHHFHFRGNRVTEVRVHIEPVTPVGAVAEEDPELFKGLGGGGADPREAYAPRPGPGSISEEQIRQFLRRFYEALDSGDADTAASLFHPGVTIHLWDGVTFTSREEFREWFERLFSTSKDAWREIKSLEVRGDTVEVHVQLHFTLN

SEQ ID NO: 651 - protein, 153 aa, synthetic construct
GQKHTVDLTHHFHFRGNRVTEVRVHIEPVTPVGEVAEKDAPLFKGLGGGGARPREAYPPRPGPGSISEEQIRQFLRRFYEALDSGDADTAASLFHPGVTIHLWDGVTFTSREEFREWFERLFSTSKDAWREIKSLEVRGDTVEVHVQLHFTLN

SEQ ID NO: 652 - protein, 153 aa, synthetic construct
GQKHTVDLTHHFHFRGNRVTEVRVHIDPLTPVGEVAERDAPLFRGLGGGGARPREAFRPRPGPGSISEEQIRQFLRRFYEALDSGDADTAASLFHPGVTIHLWDGVTFTSREEFREWFERLFSTSKDAWREIKSLEVRGDTVEVHVQLHFTLN

SEQ ID NO: 653 - protein, 153 aa, synthetic construct
GQKHTVDLTHHFHFRGNRVTEVRVHIEPITPVGEVAEKDRPLFAGLGGGGANPRLAYEPREGPGSISEEQIRQFLRRFYEALDSGDADTAASLFHPGVTIHLWDGVTFTSREEFREWFERLFSTSKDAWREIKSLEVRGDTVEVHVQLHFTLN

SEQ ID NO: 654 - protein, 153 aa, synthetic construct
GQKHTVDLTHHFHFRGNRVTEVRVHIEPVTPVGEVAERDRPLFAGLGGGGARPRLAYPPRAGPGSISEEQIRQFLRRFYEALDSGDADTAASLFHPGVTIHLWDGVTFTSREEFREWFERLFSTSKDAWREIKSLEVRGDTVEVHVQLHFTLN

SEQ ID NO: 655 - protein, 153 aa, synthetic construct
GQKHTVDLTHHFHFRGNRVTEVRVHINPLTPVGEVAEKDKPLFKGLGGGGARPREAWRPRAGPGSISEEQIRQFLRRFYEALDSGDADTAASLFHPGVTIHLWDGVTFTSREEFREWFERLFSTSKDAWREIKSLEVRGDTVEVHVQLHFTLN

SEQ ID NO: 656 - protein, 153 aa, synthetic construct
GQKHTVDLTHHFHFRGNRVTEVRVHIRPLTPVGEVAERDRPEFAGLGGGGADPREAFPPRAGPGSISEEQIRQFLRRFYEALDSGDADTAASLFHPGVTIHLWDGVTFTSREEFREWFERLFSTSKDAWREIKSLEVRGDTVEVHVQLHFTLN

SEQ ID NO: 657 - protein, 153 aa, synthetic construct
GQKHTVDLTHHFHFRGNRVTEVRVHINPVTPVGEVAEKDRPLFAGLGGGGADPREAYAPRAGPGSISEEQIRQFLRRFYEALDSGDADTAASLFHPGVTIHLWDGVTFTSREEFREWFERLFSTSKDAWREIKSLEVRGDTVEVHVQLHFTLN

SEQ ID NO: 658 - protein, 153 aa, synthetic construct
GQKHTVDLTHHFHFRGNRVTEVRVHIRPITPVGEVAERDAPLFRGLGGGGAQPRLAYAPRAGPGSISEEQIRQFLRRFYEALDSGDADTAASLFHPGVTIHLWDGVTFTSREEFREWFERLFSTSKDAWREIKSLEVRGDTVEVHVQLHFTLN

SEQ ID NO: 659 - protein, 153 aa, synthetic construct
GQKHTVDLTHHFHFRGNRVTEVRVHINPITPVGEVAEKDAPLFKGLGGGGADPRLAYPPREGPGSISEEQIRQFLRRFYEALDSGDADTAASLFHPGVTIHLWDGVTFTSREEFREWFERLFSTSKDAWREIKSLEVRGDTVEVHVQLHFTLN

SEQ ID NO: 660 - protein, 153 aa, synthetic construct
GQKHTVDLTHHFHFRGNRVTEVRVHINPLTPVGEVAEKDAPLFKGLGGGGANPRFAYEPRAGPGSISEEQIRQFLRRFYEALDSGDADTAASLFHPGVTIHLWDGVTFTSREEFREWFERLFSTSKDAWREIKSLEVRGDTVEVHVQLHFTLN

SEQ ID NO: 661 - protein, 153 aa, synthetic construct
GQKHTVDLTHHFHFRGNRVTEVRVHIEPLTPVGPVAERERGLFAGLGGGGARPRLAFPPRPGPGSISEEQIRQFLRRFYEALDSGDADTAASLFHPGVTIHLWDGVTFTSREEFREWFERLFSTSKDAWREIKSLEVRGDTVEVHVQLHFTLN

SEQ ID NO: 662 - protein, 153 aa, synthetic construct
GQKHTVDLTHHFHFRGNRVTEVRVHINPVTPVGEVAEKDKPLFKGLGGGGADPREAWPPREGPGSISEEQIRQFLRRFYEALDSGDADTAASLFHPGVTIHLWDGVTFTSREEFREWFERLFSTSKDAWREIKSLEVRGDTVEVHVQLHFTLN

SEQ ID NO: 663 - protein, 153 aa, synthetic construct
GQKHTVDLTHHFHFRGNRVTEVRVHIEPITPVGEVAEEDPELFKGLGGGGADPREAWPPREGPGSISEEQIRQFLRRFYEALDSGDADTAASLFHPGVTIHLWDGVTFTSREEFREWFERLFSTSKDAWREIKSLEVRGDTVEVHVQLHFTLN

SEQ ID NO: 664 - protein, 153 aa, synthetic construct
GQKHTVDLTHHFHFRGNRVTEVRVHINPVTPVGEVAEKDAPLFKGLGGGGAHPREAYAPRAGPGSISEEQIRQFLRRFYEALDSGDADTAASLFHPGVTIHLWDGVTFTSREEFREWFERLFSTSKDAWREIKSLEVRGDTVEVHVQLHFTLN

SEQ ID NO: 665 - protein, 154 aa, synthetic construct
GQKHTVDLTHHFHFRGNRVTEVRVHINPTTGEEEREFVRELREELREELRERRLLRLELPEGGGGPMSEEQIRQFLRRFYEALDSGDADTAASLFHPGVTIHLWDGVTFTSREEFREWFERLFSTSKDAWREIKSLEVRGDTVEVHVQLHFTLN

SEQ ID NO: 666 - protein, 154 aa, synthetic construct
GQKHTVDLTHHFHFRGNRVTEVRVHIHPTGPAAQAAVDALAAEARAWTGARAGRAAGGPRGGGGPGISEEQIRQFLRRFYEALDSGDADTAASLFHPGVTIHLWDGVTFTSREEFREWFERLFSTSKDAWREIKSLEVRGDTVEVHVQLHFTLN

SEQ ID NO: 667 - protein, 154 aa, synthetic construct
GQKHTVDLTHHFHFRGNRVTEVRVHITPRDAASEAAVARLSAEAREFTGARAGRADGAPRGGGGPGISEEQIRQFLRRFYEALDSGDADTAASLFHPGVTIHLWDGVTFTSREEFREWFERLFSTSKDAWREIKSLEVRGDTVEVHVQLHFTLN

SEQ ID NO: 668 - protein, 154 aa, synthetic construct
GQKHTVDLTHHFHFRGNRVTEVRVHITPTNAAAQAAVDALSAAAREWTGARAGRADGAPRGGGGPGISEEQIRQFLRRFYEALDSGDADTAASLFHPGVTIHLWDGVTFTSREEFREWFERLFSTSKDAWREIKSLEVRGDTVEVHVQLHFTLN

SEQ ID NO: 669 - protein, 154 aa, synthetic construct
GQKHTVDLTHHFHFRGNRVTEVRVHITPTNAAAQEAVDRISKEAREFTGARAGKADGGPRGGGGPGISEEQIRQFLRRFYEALDSGDADTAASLFHPGVTIHLWDGVTFTSREEFREWFERLFSTSKDAWREIKSLEVRGDTVEVHVQLHFTLN

SEQ ID NO: 670 - protein, 154 aa, synthetic construct
GQKHTVDLTHHFHFRGNRVTEVRVHIHPTGPAAEEAVARLSAEAREWTGARAGRADGGPRGGGGPGISEEQIRQFLRRFYEALDSGDADTAASLFHPGVTIHLWDGVTFTSREEFREWFERLFSTSKDAWREIKSLEVRGDTVEVHVQLHFTLN

SEQ ID NO: 671 - protein, 154 aa, synthetic construct
GQKHTVDLTHHFHFRGNRVTEVRVHIHPTDEAAKAAVARISAEMAEFTGARAGRAHGGPRGGGGPGISEEQIRQFLRRFYEALDSGDADTAASLFHPGVTIHLWDGVTFTSREEFREWFERLFSTSKDAWREIKSLEVRGDTVEVHVQLHFTLN

SEQ ID NO: 672 - protein, 154 aa, synthetic construct
GQKHTVDLTHHFHFRGNRVTEVRVHITPRDAAAEAAVASLSAAAREFTGARAGRADGGPRGGGGPGISEEQIRQFLRRFYEALDSGDADTAASLFHPGVTIHLWDGVTFTSREEFREWFERLFSTSKDAWREIKSLEVRGDTVEVHVQLHFTLN

SEQ ID NO: 673 - protein, 154 aa, synthetic construct
GQKHTVDLTHHFHFRGNRVTEVRVHIHPTDEASKAAVARLSAEAAAFTGARAGRADGGARGGGGPGISEEQIRQFLRRFYEALDSGDADTAASLFHPGVTIHLWDGVTFTSREEFREWFERLFSTSKDAWREIKSLEVRGDTVEVHVQLHFTLN

SEQ ID NO: 674 - protein, 154 aa, synthetic construct
GQKHTVDLTHHFHFRGNRVTEVRVHITPTDAAAQEAVAALSEKAREFTGERAGRARGAPRGGGGPGISEEQIRQFLRRFYEALDSGDADTAASLFHPGVTIHLWDGVTFTSREEFREWFERLFSTSKDAWREIKSLEVRGDTVEVHVQLHFTLN

SEQ ID NO: 675 - protein, 154 aa, synthetic construct
GQKHTVDLTHHFHFRGNRVTEVRVHITPTDAAAQAAVDALSAAAREWTGARAGRADGAPRGGGGPGISEEQIRQFLRRFYEALDSGDADTAASLFHPGVTIHLWDGVTFTSREEFREWFERLFSTSKDAWREIKSLEVRGDTVEVHVQLHFTLN

SEQ ID NO: 676 - protein, 154 aa, synthetic construct
GQKHTVDLTHHFHFRGNRVTEVRVHIEPTGPAAQAAVDALSAEAREWTGARAGRADGGERGGGGPGISEEQIRQFLRRFYEALDSGDADTAASLFHPGVTIHLWDGVTFTSREEFREWFERLFSTSKDAWREIKSLEVRGDTVEVHVQLHFTLN

SEQ ID NO: 677 - protein, 154 aa, synthetic construct
GQKHTVDLTHHFHFRGNRVTEVRVHITPTGPAAAAAVAAIAERAREFTGARAGRADGGPRGGGGPGISEEQIRQFLRRFYEALDSGDADTAASLFHPGVTIHLWDGVTFTSREEFREWFERLFSTSKDAWREIKSLEVRGDTVEVHVQLHFTLN

SEQ ID NO: 678 - protein, 154 aa, synthetic construct
GQKHTVDLTHHFHFRGNRVTEVRVHITPRDAASQEAVARLSAEAREWTGARAGRARGGPRGGGGPGISEEQIRQFLRRFYEALDSGDADTAASLFHPGVTIHLWDGVTFTSREEFREWFERLFSTSKDAWREIKSLEVRGDTVEVHVQLHFTLN

SEQ ID NO: 679 - protein, 154 aa, synthetic construct
GQKHTVDLTHHFHFRGNRVTEVRVHITPTNEAARQAVAELSARAREWTGARAGRARGGPRGGGGPGISEEQIRQFLRRFYEALDSGDADTAASLFHPGVTIHLWDGVTFTSREEFREWFERLFSTSKDAWREIKSLEVRGDTVEVHVQLHFTLN

SEQ ID NO: 680 - protein, 154 aa, synthetic construct
GQKHTVDLTHHFHFRGNRVTEVRVHITPTGPAAQAAVDALSARAREWTGARAGRAHGAPRGGGGPGISEEQIRQFLRRFYEALDSGDADTAASLFHPGVTIHLWDGVTFTSREEFREWFERLFSTSKDAWREIKSLEVRGDTVEVHVQLHFTLN

SEQ ID NO: 681 - protein, 154 aa, synthetic construct
GQKHTVDLTHHFHFRGNRVTEVRVHIHPTDEASKAAVDAISAEAAKFTGARAGRADGGPRGGGGPGISEEQIRQFLRRFYEALDSGDADTAASLFHPGVTIHLWDGVTFTSREEFREWFERLFSTSKDAWREIKSLEVRGDTVEVHVQLHFTLN

SEQ ID NO: 682 - protein, 154 aa, synthetic construct
GQKHTVDLTHHFHFRGNRVTEVRVHITPRDEASRKAVEAISAEAAKWTGERAGRARGAPRGGGGPGISEEQIRQFLRRFYEALDSGDADTAASLFHPGVTIHLWDGVTFTSREEFREWFERLFSTSKDAWREIKSLEVRGDTVEVHVQLHFTLN

SEQ ID NO: 683 - protein, 154 aa, synthetic construct
GQKHTVDLTHHFHFRGNRVTEVRVHIHPTDEASQAAVDRLLEEARAWTGARAGRARGGPRGGGGPGISEEQIRQFLRRFYEALDSGDADTAASLFHPGVTIHLWDGVTFTSREEFREWFERLFSTSKDAWREIKSLEVRGDTVEVHVQLHFTLN

SEQ ID NO: 684 - protein, 154 aa, synthetic construct
GQKHTVDLTHHFHFRGNRVTEVRVHIQPTGPAAQAAVDQISEEARAWTGARAGRADGGPRGGGGPGISEEQIRQFLRRFYEALDSGDADTAASLFHPGVTIHLWDGVTFTSREEFREWFERLFSTSKDAWREIKSLEVRGDTVEVHVQLHFTLN

SEQ ID NO: 685 - protein, 154 aa, synthetic construct
GQKHTVDLTHHFHFRGNRVTEVRVHITPTGPAAQAAVDAISARAREWTGARAGRARGGPRGGGGPGISEEQIRQFLRRFYEALDSGDADTAASLFHPGVTIHLWDGVTFTSREEFREWFERLFSTSKDAWREIKSLEVRGDTVEVHVQLHFTLN

SEQ ID NO: 686 - protein, 155 aa, synthetic construct
GQKHTVDLTHHFHFRGNRVTEVRVHINPTTGEEARAFLRELREELRELLRLLLLLLPLEEEPEGGGPMSEEQIRQFLRRFYEALDSGDADTAASLFHPGVTIHLWDGVTFTSREEFREWFERLFSTSKDAWREIKSLEVRGDTVEVHVQLHFTLN

SEQ ID NO: 687 - protein, 155 aa, synthetic construct
GQKHTVDLTHHFHFRGNRVTEVRVHIHPRDAAAQEAVDKLSDVFLAEVRERRAGDPAFRRPEGGGEPISEEQIRQFLRRFYEALDSGDADTAASLFHPGVTIHLWDGVTFTSREEFREWFERLFSTSKDAWREIKSLEVRGDTVEVHVQLHFTLN

SEQ ID NO: 688 - protein, 155 aa, synthetic construct
GQKHTVDLTHHFHFRGNRVTEVRVHITPTGPASQEAVDKLSAVFLEEVRKRRAGEPSWARPEGGDEPISEEQIRQFLRRFYEALDSGDADTAASLFHPGVTIHLWDGVTFTSREEFREWFERLFSTSKDAWREIKSLEVRGDTVEVHVQLHFTLN

SEQ ID NO: 689 - protein, 155 aa, synthetic construct
GQKHTVDLTHHFHFRGNRVTEVRVHITPRDAAAQAAVEHLSAVFLEEVRKRRAGGYSWRRPEGGEEPISEEQIRQFLRRFYEALDSGDADTAASLFHPGVTIHLWDGVTFTSREEFREWFERLFSTSKDAWREIKSLEVRGDTVEVHVQLHFTLN

SEQ ID NO: 690 - protein, 155 aa, synthetic construct
GQKHTVDLTHHFHFRGNRVTEVRVHITPKDEASQKAVDHLSDVFLSEVEKRRAGDPAWRRPEGGDEPISEEQIRQFLRRFYEALDSGDADTAASLFHPGVTIHLWDGVTFTSREEFREWFERLFSTSKDAWREIKSLEVRGDTVEVHVQLHFTLN

SEQ ID NO: 691 - protein, 155 aa, synthetic construct
GQKHTVDLTHHFHFRGNRVTEVRVHIHPKDAAAQEAVQHLSDVFLAEARRRRAGAYEWARPEGGAEPISEEQIRQFLRRFYEALDSGDADTAASLFHPGVTIHLWDGVTFTSREEFREWFERLFSTSKDAWREIKSLEVRGDTVEVHVQLHFTLN

SEQ ID NO: 692 - protein, 155 aa, synthetic construct
GQKHTVDLTHHFHFRGNRVTEVRVHITPRDEASQEAVEKLSAVFLEEARKRRAGDYAWARPEGGSEPISEEQIRQFLRRFYEALDSGDADTAASLFHPGVTIHLWDGVTFTSREEFREWFERLFSTSKDAWREIKSLEVRGDTVEVHVQLHFTLN

SEQ ID NO: 693 - protein, 155 aa, synthetic construct
GQKHTVDLTHHFHFRGNRVTEVRVHITPRDAASQEAVDYLRDVFLAEARKRRAGDYSFARPEGGDEPISEEQIRQFLRRFYEALDSGDADTAASLFHPGVTIHLWDGVTFTSREEFREWFERLFSTSKDAWREIKSLEVRGDTVEVHVQLHFTLN

SEQ ID NO: 694 - protein, 155 aa, synthetic construct
GQKHTVDLTHHFHFRGNRVTEVRVHITPRDEASEKAVQHLSDVFLSEVEKRRAGDYAWTRPEGGDEPISEEQIRQFLRRFYEALDSGDADTAASLFHPGVTIHLWDGVTFTSREEFREWFERLFSTSKDAWREIKSLEVRGDTVEVHVQLHFTLN

SEQ ID NO: 695 - protein, 155 aa, synthetic construct
GQKHTVDLTHHFHFRGNRVTEVRVHITPRDEAAKEAVEHLSKVFLEEAKKRRRGGYSWARPEGGDEPISEEQIRQFLRRFYEALDSGDADTAASLFHPGVTIHLWDGVTFTSREEFREWFERLFSTSKDAWREIKSLEVRGDTVEVHVQLHFTLN

SEQ ID NO: 696 - protein, 155 aa, synthetic construct
GQKHTVDLTHHFHFRGNRVTEVRVHITPRDEASQKAVDHLREVFLSEVRKRRAGEPAWRRPEGGAEPISEEQIRQFLRRFYEALDSGDADTAASLFHPGVTIHLWDGVTFTSREEFREWFERLFSTSKDAWREIKSLEVRGDTVEVHVQLHFTLN

SEQ ID NO: 697 - protein, 155 aa, synthetic construct
GQKHTVDLTHHFHFRGNRVTEVRVHITPRDAASQEAVDKLRDVFLAEVRERRAGGAAWTRPEGGSEPISEEQIRQFLRRFYEALDSGDADTAASLFHPGVTIHLWDGVTFTSREEFREWFERLFSTSKDAWREIKSLEVRGDTVEVHVQLHFTLN

SEQ ID NO: 698 - protein, 155 aa, synthetic construct
GQKHTVDLTHHFHFRGNRVTEVRVHITPTNAAAQEAVEKLSAVFMAEVAKRRAGGYAWTRPEGGDEPISEEQIRQFLRRFYEALDSGDADTAASLFHPGVTIHLWDGVTFTSREEFREWFERLFSTSKDAWREIKSLEVRGDTVEVHVQLHFTLN

SEQ ID NO: 699 - protein, 155 aa, synthetic construct
GQKHTVDLTHHFHFRGNRVTEVRVHITPTGPAAQEAVDHLSAVFLEEARERRAGEFSWARPEGGAEPISEEQIRQFLRRFYEALDSGDADTAASLFHPGVTIHLWDGVTFTSREEFREWFERLFSTSKDAWREIKSLEVRGDTVEVHVQLHFTLN

SEQ ID NO: 700 - protein, 155 aa, synthetic construct
GQKHTVDLTHHFHFRGNRVTEVRVHITPTNAAAQEAVDRLRAVFLEEARERRAGGYEWRRPEGGDEPISEEQIRQFLRRFYEALDSGDADTAASLFHPGVTIHLWDGVTFTSREEFREWFERLFSTSKDAWREIKSLEVRGDTVEVHVQLHFTLN

SEQ ID NO: 701 - protein, 155 aa, synthetic construct
GQKHTVDLTHHFHFRGNRVTEVRVHIRPTGPASQEAVEHLRRVFLEEVRKRRRGDYAWRRPEGGEEPISEEQIRQFLRRFYEALDSGDADTAASLFHPGVTIHLWDGVTFTSREEFREWFERLFSTSKDAWREIKSLEVRGDTVEVHVQLHFTLN

SEQ ID NO: 702 - protein, 155 aa, synthetic construct
GQKHTVDLTHHFHFRGNRVTEVRVHITPRGPAAQEAVDHLSDVFLEEVRKRRAGDYAWRRPEGGDEPISEEQIRQFLRRFYEALDSGDADTAASLFHPGVTIHLWDGVTFTSREEFREWFERLFSTSKDAWREIKSLEVRGDTVEVHVQLHFTLN

SEQ ID NO: 703 - protein, 155 aa, synthetic construct
GQKHTVDLTHHFHFRGNRVTEVRVHITPRDAAAEKAVQKLSDVFLAEVRKRRAGEPAWRRPEGGDEPISEEQIRQFLRRFYEALDSGDADTAASLFHPGVTIHLWDGVTFTSREEFREWFERLFSTSKDAWREIKSLEVRGDTVEVHVQLHFTLN

SEQ ID NO: 704 - protein, 155 aa, synthetic construct
GQKHTVDLTHHFHFRGNRVTEVRVHITPRDEASQKAVDYLSDVFLSEARKRRRGEPSWARPEGGDEPISEEQIRQFLRRFYEALDSGDADTAASLFHPGVTIHLWDGVTFTSREEFREWFERLFSTSKDAWREIKSLEVRGDTVEVHVQLHFTLN

SEQ ID NO: 705 - protein, 155 aa, synthetic construct
GQKHTVDLTHHFHFRGNRVTEVRVHIKPRDEASQEAVQKLSDVFLEEARKRRRGDFSWARPEGGDEPISEEQIRQFLRRFYEALDSGDADTAASLFHPGVTIHLWDGVTFTSREEFREWFERLFSTSKDAWREIKSLEVRGDTVEVHVQLHFTLN

SEQ ID NO: 706 - protein, 155 aa, synthetic construct
GQKHTVDLTHHFHFRGNRVTEVRVHITPTGPESQKAVDYLRETFLEEARKRRAGGFSWARPEGGDEPISEEQIRQFLRRFYEALDSGDADTAASLFHPGVTIHLWDGVTFTSREEFREWFERLFSTSKDAWREIKSLEVRGDTVEVHVQLHFTLN

SEQ ID NO: 707 - protein, 156 aa, synthetic construct
GQKHTVDLTHHFHFRGNRVTEVRVHINPTTGEEEREFVRELREELREELLRRLLLLLLALLAEGEGGPMSEEQIRQFLRRFYEALDSGDADTAASLFHPGVTIHLWDGVTFTSREEFREWFERLFSTSKDAWREIKSLEVRGDTVEVHVQLHFTLN

SEQ ID NO: 708 - protein, 156 aa, synthetic construct
GQKHTVDLTHHFHFRGNRVTEVRVHIYPTGPASQAAVDRLSALGREAAEGRLAGRGEGLERERTEGPPISEEQIRQFLRRFYEALDSGDADTAASLFHPGVTIHLWDGVTFTSREEFREWFERLFSTSKDAWREIKSLEVRGDTVEVHVQLHFTLN

SEQ ID NO: 709 - protein, 156 aa, synthetic construct
GQKHTVDLTHHFHFRGNRVTEVRVHIFPTNEAAEKAVQRLAELGREAARGRLEERGEGLEAEREEGPPISEEQIRQFLRRFYEALDSGDADTAASLFHPGVTIHLWDGVTFTSREEFREWFERLFSTSKDAWREIKSLEVRGDTVEVHVQLHFTLN

SEQ ID NO: 710 - protein, 156 aa, synthetic construct
GQKHTVDLTHHFHFRGNRVTEVRVHIFPRDAASQEAVDRLAAELREAVAGRAAERAAGLEAEREEGPPISEEQIRQFLRRFYEALDSGDADTAASLFHPGVTIHLWDGVTFTSREEFREWFERLFSTSKDAWREIKSLEVRGDTVEVHVQLHFTLN

SEQ ID NO: 711 - protein, 156 aa, synthetic construct
GQKHTVDLTHHFHFRGNRVTEVRVHITPTDAASQAAVEALSERLREAAAGRLEERGEGLEEEREEGPPISEEQIRQFLRRFYEALDSGDADTAASLFHPGVTIHLWDGVTFTSREEFREWFERLFSTSKDAWREIKSLEVRGDTVEVHVQLHFTLN

SEQ ID NO: 712 - protein, 156 aa, synthetic construct
GQKHTVDLTHHFHFRGNRVTEVRVHIHPTGPASAAAVEALAERLRAAAEGRLAERGEGLEATRTGGPPISEEQIRQFLRRFYEALDSGDADTAASLFHPGVTIHLWDGVTFTSREEFREWFERLFSTSKDAWREIKSLEVRGDTVEVHVQLHFTLN

SEQ ID NO: 713 - protein, 156 aa, synthetic construct
GQKHTVDLTHHFHFRGNRVTEVRVHITPTGPESQAAVDRLSALGREFARGRLEERGEGLEEEREEGPPISEEQIRQFLRRFYEALDSGDADTAASLFHPGVTIHLWDGVTFTSREEFREWFERLFSTSKDAWREIKSLEVRGDTVEVHVQLHFTLN

SEQ ID NO: 714 - protein, 156 aa, synthetic construct
GQKHTVDLTHHFHFRGNRVTEVRVHIHPRDAASQAAVDQLAALGREFAAGRLEERGAGLEASREEGPPISEEQIRQFLRRFYEALDSGDADTAASLFHPGVTIHLWDGVTFTSREEFREWFERLFSTSKDAWREIKSLEVRGDTVEVHVQLHFTLN

SEQ ID NO: 715 - protein, 156 aa, synthetic construct
GQKHTVDLTHHFHFRGNRVTEVRVHIHPTDAASQAAVDQLAAIGREAARGRLEERGEDLEREREEGPPISEEQIRQFLRRFYEALDSGDADTAASLFHPGVTIHLWDGVTFTSREEFREWFERLFSTSKDAWREIKSLEVRGDTVEVHVQLHFTLN

SEQ ID NO: 716 - protein, 156 aa, synthetic construct
GQKHTVDLTHHFHFRGNRVTEVRVHIFPTDEASQAAVDALSALGRAAAEGRLAARGEGLEREREEGPPISEEQIRQFLRRFYEALDSGDADTAASLFHPGVTIHLWDGVTFTSREEFREWFERLFSTSKDAWREIKSLEVRGDTVEVHVQLHFTLN

SEQ ID NO: 717 - protein, 156 aa, synthetic construct
GQKHTVDLTHHFHFRGNRVTEVRVHIHPRGPASEAAVARLAALGREAAEGRLAGRGRGLEAEREEGPPISEEQIRQFLRRFYEALDSGDADTAASLFHPGVTIHLWDGVTFTSREEFREWFERLFSTSKDAWREIKSLEVRGDTVEVHVQLHFTLN

SEQ ID NO: 718 - protein, 156 aa, synthetic construct
GQKHTVDLTHHFHFRGNRVTEVRVHIAPRDAASQAAVDSLAARGREAAAGRLEARGAGLEREREEGPPISEEQIRQFLRRFYEALDSGDADTAASLFHPGVTIHLWDGVTFTSREEFREWFERLFSTSKDAWREIKSLEVRGDTVEVHVQLHFTLN

SEQ ID NO: 719 - protein, 156 aa, synthetic construct
GQKHTVDLTHHFHFRGNRVTEVRVHIEPRDAASQAAVDRLAAEGRAAAEGRLADRGEALEAEREEGPPISEEQIRQFLRRFYEALDSGDADTAASLFHPGVTIHLWDGVTFTSREEFREWFERLFSTSKDAWREIKSLEVRGDTVEVHVQLHFTLN

SEQ ID NO: 720 - protein, 156 aa, synthetic construct
GQKHTVDLTHHFHFRGNRVTEVRVHITPTDAASQAAVQSLAEELRKAAEGRLAERGEALEEEREEGPPISEEQIRQFLRRFYEALDSGDADTAASLFHPGVTIHLWDGVTFTSREEFREWFERLFSTSKDAWREIKSLEVRGDTVEVHVQLHFTLN

SEQ ID NO: 721 - protein, 156 aa, synthetic construct
GQKHTVDLTHHFHFRGNRVTEVRVHIYPRDEASRAAVEALAARGRAAAEGRLAERGEDLERERTEGPPISEEQIRQFLRRFYEALDSGDADTAASLFHPGVTIHLWDGVTFTSREEFREWFERLFSTSKDAWREIKSLEVRGDTVEVHVQLHFTLN

SEQ ID NO: 722 - protein, 156 aa, synthetic construct
GQKHTVDLTHHFHFRGNRVTEVRVHIYPTGPAAEAAVAALAERLRAHAAGRLAARGAGLEAEREEGPPISEEQIRQFLRRFYEALDSGDADTAASLFHPGVTIHLWDGVTFTSREEFREWFERLFSTSKDAWREIKSLEVRGDTVEVHVQLHFTLN

SEQ ID NO: 723 - protein, 156 aa, synthetic construct
GQKHTVDLTHHFHFRGNRVTEVRVHIYPTDAASREAVERLSRLGREHAEGRLAGRGEGLEREREEGPPISEEQIRQFLRRFYEALDSGDADTAASLFHPGVTIHLWDGVTFTSREEFREWFERLFSTSKDAWREIKSLEVRGDTVEVHVQLHFTLN

SEQ ID NO: 724 - protein, 156 aa, synthetic construct
GQKHTVDLTHHFHFRGNRVTEVRVHIFPRDAASEAAVARHSALLREAVEGRAAERGADLEAEREEGPPISEEQIRQFLRRFYEALDSGDADTAASLFHPGVTIHLWDGVTFTSREEFREWFERLFSTSKDAWREIKSLEVRGDTVEVHVQLHFTLN

SEQ ID NO: 725 - protein, 156 aa, synthetic construct
GQKHTVDLTHHFHFRGNRVTEVRVHIFPTDAASQAAVDSLAALGREAAAGRLAARGEGLDREREEGPPISEEQIRQFLRRFYEALDSGDADTAASLFHPGVTIHLWDGVTFTSREEFREWFERLFSTSKDAWREIKSLEVRGDTVEVHVQLHFTLN

SEQ ID NO: 726 - protein, 156 aa, synthetic construct
GQKHTVDLTHHFHFRGNRVTEVRVHIYPTGPASEEAVKRLSELGREAAEGRLGERGEGLEAEREEGPPISEEQIRQFLRRFYEALDSGDADTAASLFHPGVTIHLWDGVTFTSREEFREWFERLFSTSKDAWREIKSLEVRGDTVEVHVQLHFTLN

SEQ ID NO: 727 - protein, 156 aa, synthetic construct
GQKHTVDLTHHFHFRGNRVTEVRVHIFPRGPASEAAVAALAERGRAAAAGRLEGRGEGLEEEREEGPPISEEQIRQFLRRFYEALDSGDADTAASLFHPGVTIHLWDGVTFTSREEFREWFERLFSTSKDAWREIKSLEVRGDTVEVHVQLHFTLN

SEQ ID NO: 728 - protein, 157 aa, synthetic construct
GQKHTVDLTHHFHFRGNRVTEVRVHINPTTGEEEREFVRELRRELLELLLLRLLLLLLLLLRPPEGGGGMSEEQIRQFLRRFYEALDSGDADTAASLFHPGVTIHLWDGVTFTSREEFREWFERLFSTSKDAWREIKSLEVRGDTVEVHVQLHFTLN

SEQ ID NO: 729 - protein, 157 aa, synthetic construct
GQKHTVDLTHHFHFRGNRVTEVRVHITPTDAAAKAAVEQLRAVLDAIYAGRTGRFGGEPLVPPEGGSEPISEEQIRQFLRRFYEALDSGDADTAASLFHPGVTIHLWDGVTFTSREEFREWFERLFSTSKDAWREIKSLEVRGDTVEVHVQLHFTLN

SEQ ID NO: 730 - protein, 157 aa, synthetic construct
GQKHTVDLTHHFHFRGNRVTEVRVHIEPTGPAAEAAVAQLRATLDALLAGRTGRFGGEPLEPPTGGGEPISEEQIRQFLRRFYEALDSGDADTAASLFHPGVTIHLWDGVTFTSREEFREWFERLFSTSKDAWREIKSLEVRGDTVEVHVQLHFTLN

SEQ ID NO: 731 - protein, 157 aa, synthetic construct
GQKHTVDLTHHFHFRGNRVTEVRVHITPTGPAAEAAVAALRAVLDAELAGRTGTFGGEPLVPPEGGGEPISEEQIRQFLRRFYEALDSGDADTAASLFHPGVTIHLWDGVTFTSREEFREWFERLFSTSKDAWREIKSLEVRGDTVEVHVQLHFTLN

SEQ ID NO: 732 - protein, 157 aa, synthetic construct
GQKHTVDLTHHFHFRGNRVTEVRVHITPTGPAAQAAVERLLAVLRERLAGRTGRFGGEPLVPPEGGGEPISEEQIRQFLRRFYEALDSGDADTAASLFHPGVTIHLWDGVTFTSREEFREWFERLFSTSKDAWREIKSLEVRGDTVEVHVQLHFTLN

SEQ ID NO: 733 - protein, 157 aa, synthetic construct
GQKHTVDLTHHFHFRGNRVTEVRVHITPRDAAAQAAVDQLLAVQREILAGRTGRFGGEPLEPATGPGEPISEEQIRQFLRRFYEALDSGDADTAASLFHPGVTIHLWDGVTFTSREEFREWFERLFSTSKDAWREIKSLEVRGDTVEVHVQLHFTLN

SEQ ID NO: 734 - protein, 157 aa, synthetic construct
GQKHTVDLTHHFHFRGNRVTEVRVHIKPTDAAAQAAVDRLLAVLREIYAGRTGRFGGEPLVPPEGGSEPISEEQIRQFLRRFYEALDSGDADTAASLFHPGVTIHLWDGVTFTSREEFREWFERLFSTSKDAWREIKSLEVRGDTVEVHVQLHFTLN

SEQ ID NO: 735 - protein, 157 aa, synthetic construct
GQKHTVDLTHHFHFRGNRVTEVRVHIEPTDEASKAAVDRLLAVLRERLAGRTGRFGGEPLRPPEGGSEPISEEQIRQFLRRFYEALDSGDADTAASLFHPGVTIHLWDGVTFTSREEFREWFERLFSTSKDAWREIKSLEVRGDTVEVHVQLHFTLN

SEQ ID NO: 736 - protein, 157 aa, synthetic construct
GQKHTVDLTHHFHFRGNRVTEVRVHITPTDEAAKKAVAQLRAVLRELLAGRTGRFGGEPLVPPTGGGEPISEEQIRQFLRRFYEALDSGDADTAASLFHPGVTIHLWDGVTFTSREEFREWFERLFSTSKDAWREIKSLEVRGDTVEVHVQLHFTLN

SEQ ID NO: 737 - protein, 157 aa, synthetic construct
GQKHTVDLTHHFHFRGNRVTEVRVHITPTGPAAEAAVKQLYDVLRKILEGRTGKFGGEPLVPPEGGSEPISEEQIRQFLRRFYEALDSGDADTAASLFHPGVTIHLWDGVTFTSREEFREWFERLFSTSKDAWREIKSLEVRGDTVEVHVQLHFTLN

SEQ ID NO: 738 - protein, 157 aa, synthetic construct
GQKHTVDLTHHFHFRGNRVTEVRVHITPTGPAAQAAVDQLLEVLRKELAGRTGKFGGQPLEPPTGGEEPISEEQIRQFLRRFYEALDSGDADTAASLFHPGVTIHLWDGVTFTSREEFREWFERLFSTSKDAWREIKSLEVRGDTVEVHVQLHFTLN

SEQ ID NO: 739 - protein, 157 aa, synthetic construct
GQKHTVDLTHHFHFRGNRVTEVRVHITPTDAAAQAAVDQLLAVQRALLAGRTGRYGGEPLAPPTGGSEPISEEQIRQFLRRFYEALDSGDADTAASLFHPGVTIHLWDGVTFTSREEFREWFERLFSTSKDAWREIKSLEVRGDTVEVHVQLHFTLN

SEQ ID NO: 740 - protein, 157 aa, synthetic construct
GQKHTVDLTHHFHFRGNRVTEVRVHITPTDEAAQAAVAQLLETLRALLAGRTGRFGGEPLRPPEGGGEPISEEQIRQFLRRFYEALDSGDADTAASLFHPGVTIHLWDGVTFTSREEFREWFERLFSTSKDAWREIKSLEVRGDTVEVHVQLHFTLN

SEQ ID NO: 741 - protein, 157 aa, synthetic construct
GQKHTVDLTHHFHFRGNRVTEVRVHITPTGPAAEAAVAQLVEVLRAIYAGRTGKFGGEPLRPPSGPGEPISEEQIRQFLRRFYEALDSGDADTAASLFHPGVTIHLWDGVTFTSREEFREWFERLFSTSKDAWREIKSLEVRGDTVEVHVQLHFTLN

SEQ ID NO: 742 - protein, 157 aa, synthetic construct
GQKHTVDLTHHFHFRGNRVTEVRVHITPTDEAAQKAVEQLLATLRAIYEGRTGRFGGEPLVPPEGGSEPISEEQIRQFLRRFYEALDSGDADTAASLFHPGVTIHLWDGVTFTSREEFREWFERLFSTSKDAWREIKSLEVRGDTVEVHVQLHFTLN

SEQ ID NO: 743 - protein, 157 aa, synthetic construct
GQKHTVDLTHHFHFRGNRVTEVRVHIEPTDEAARAAVAALFAVLHSLLAGRTGKFGGEPLRPPEGGSEPISEEQIRQFLRRFYEALDSGDADTAASLFHPGVTIHLWDGVTFTSREEFREWFERLFSTSKDAWREIKSLEVRGDTVEVHVQLHFTLN

SEQ ID NO: 744 - protein, 157 aa, synthetic construct
GQKHTVDLTHHFHFRGNRVTEVRVHITPTDEAAKAAVDALVAVLDAELAGRTGRFGGEPLRPPTGGGEPISEEQIRQFLRRFYEALDSGDADTAASLFHPGVTIHLWDGVTFTSREEFREWFERLFSTSKDAWREIKSLEVRGDTVEVHVQLHFTLN

SEQ ID NO: 745 - protein, 157 aa, synthetic construct
GQKHTVDLTHHFHFRGNRVTEVRVHITPTNAEAEKAVAELLAVLDELLAGRTGTRGGEPLRPPEGGSEPISEEQIRQFLRRFYEALDSGDADTAASLFHPGVTIHLWDGVTFTSREEFREWFERLFSTSKDAWREIKSLEVRGDTVEVHVQLHFTLN

SEQ ID NO: 746 - protein, 157 aa, synthetic construct
GQKHTVDLTHHFHFRGNRVTEVRVHITPTDAASQAAVAQLRAVLDELLAGRTGKFGGEPLTPPSGGGEPISEEQIRQFLRRFYEALDSGDADTAASLFHPGVTIHLWDGVTFTSREEFREWFERLFSTSKDAWREIKSLEVRGDTVEVHVQLHFTLN

SEQ ID NO: 747 - protein, 157 aa, synthetic construct
GQKHTVDLTHHFHFRGNRVTEVRVHITPRDEAAQAAVDRLVAVLEAIYAGRTGRFGGEPLRPPEGGGEPISEEQIRQFLRRFYEALDSGDADTAASLFHPGVTIHLWDGVTFTSREEFREWFERLFSTSKDAWREIKSLEVRGDTVEVHVQLHFTLN

SEQ ID NO: 748 - protein, 157 aa, synthetic construct
GQKHTVDLTHHFHFRGNRVTEVRVHITPTGPAAEAAVAQLLATLRAIYAGRTGRFGGEPLVPPEGGGEPISEEQIRQFLRRFYEALDSGDADTAASLFHPGVTIHLWDGVTFTSREEFREWFERLFSTSKDAWREIKSLEVRGDTVEVHVQLHFTLN

SEQ ID NO: 749 - protein, 158 aa, synthetic construct
GQKHTVDLTHHFHFRGNRVTEVRVHINPTTGEEEREFVRELLEELLELLRELRLLLLLLLLELLAGGGGPMSEEQIRQFLRRFYEALDSGDADTAASLFHPGVTIHLWDGVTFTSREEFREWFERLFSTSKDAWREIKSLEVRGDTVEVHVQLHFTLN

SEQ ID NO: 750 - protein, 158 aa, synthetic construct
GQKHTVDLTHHFHFRGNRVTEVRVHIHPTGPAAEAAVAALSARLREAFAGRIGLGERPDARPLLTGGGPGITEEQIRQFLRRFYEALDSGDADTAASLFHPGVTIHLWDGVTFTSREEFREWFERLFSTSKDAWREIKSLEVRGDTVEVHVQLHFTLN

SEQ ID NO: 751 - protein, 158 aa, synthetic construct
GQKHTVDLTHHFHFRGNRVTEVRVHIHPTGPAAEEAVARLSAILREAFAGRIGLGGREDLRPLPEGGGPGITEEQIRQFLRRFYEALDSGDADTAASLFHPGVTIHLWDGVTFTSREEFREWFERLFSTSKDAWREIKSLEVRGDTVEVHVQLHFTLN

SEQ ID NO: 752 - protein, 158 aa, synthetic construct
GQKHTVDLTHHFHFRGNRVTEVRVHIHPTGPASEAAVAALRARLREAFAGRIGLGGEPDERLDLTGGGPGISEEQIRQFLRRFYEALDSGDADTAASLFHPGVTIHLWDGVTFTSREEFREWFERLFSTSKDAWREIKSLEVRGDTVEVHVQLHFTLN

SEQ ID NO: 753 - protein, 158 aa, synthetic construct
GQKHTVDLTHHFHFRGNRVTEVRVHIHPRGPAAEAAVARLRAELAAAFAGRIGLAGAPDARLLPEGGGPGITEEQIRQFLRRFYEALDSGDADTAASLFHPGVTIHLWDGVTFTSREEFREWFERLFSTSKDAWREIKSLEVRGDTVEVHVQLHFTLN

SEQ ID NO: 754 - protein, 158 aa, synthetic construct
GQKHTVDLTHHFHFRGNRVTEVRVHIHPTDAASEAAVAALRARLAEAFAGRIGLGGAEDARADLTGGGPGITEEQIRQFLRRFYEALDSGDADTAASLFHPGVTIHLWDGVTFTSREEFREWFERLFSTSKDAWREIKSLEVRGDTVEVHVQLHFTLN

SEQ ID NO: 755 - protein, 158 aa, synthetic construct
GQKHTVDLTHHFHFRGNRVTEVRVHIHPRGPASEAAVAALRARLAEAFAGRIGLAGGEDERALLTGGGPGISEEQIRQFLRRFYEALDSGDADTAASLFHPGVTIHLWDGVTFTSREEFREWFERLFSTSKDAWREIKSLEVRGDTVEVHVQLHFTLN

SEQ ID NO: 756 - protein, 158 aa, synthetic construct
GQKHTVDLTHHFHFRGNRVTEVRVHIHPTGPAAEAAVAALRAELAKAFAGRIGLGARPDERAYLGGGGPGITEEQIRQFLRRFYEALDSGDADTAASLFHPGVTIHLWDGVTFTSREEFREWFERLFSTSKDAWREIKSLEVRGDTVEVHVQLHFTLN

SEQ ID NO: 757 - protein, 158 aa, synthetic construct
GQKHTVDLTHHFHFRGNRVTEVRVHIHPTGPAAEAAVAALSAKLREAFAGRIGLGGREDERALLEGGGPGITEEQIRQFLRRFYEALDSGDADTAASLFHPGVTIHLWDGVTFTSREEFREWFERLFSTSKDAWREIKSLEVRGDTVEVHVQLHFTLN

SEQ ID NO: 758 - protein, 158 aa, synthetic construct
GQKHTVDLTHHFHFRGNRVTEVRVHIHPTDAASEAAVARLVEELRAAFAGRIGLGERPDARAELTGGGPGITEEQIRQFLRRFYEALDSGDADTAASLFHPGVTIHLWDGVTFTSREEFREWFERLFSTSKDAWREIKSLEVRGDTVEVHVQLHFTLN

SEQ ID NO: 759 - protein, 158 aa, synthetic construct
GQKHTVDLTHHFHFRGNRVTEVRVHIHPTGPAAEAAVARLVAELREAFAGRIGLGERADLRAELGGGGPGISEEQIRQFLRRFYEALDSGDADTAASLFHPGVTIHLWDGVTFTSREEFREWFERLFSTSKDAWREIKSLEVRGDTVEVHVQLHFTLN

SEQ ID NO: 760 - protein, 158 aa, synthetic construct
GQKHTVDLTHHFHFRGNRVTEVRVHIHPTDEAAKAAVAALSARLKEAFAGRIGLGEREDARADLTGGGPGISEEQIRQFLRRFYEALDSGDADTAASLFHPGVTIHLWDGVTFTSREEFREWFERLFSTSKDAWREIKSLEVRGDTVEVHVQLHFTLN

SEQ ID NO: 761 - protein, 158 aa, synthetic construct
GQKHTVDLTHHFHFRGNRVTEVRVHITPTDAAAEAAVAALRARLREAFAGRIGLAGAEPAAADLTGGGPGISEEQIRQFLRRFYEALDSGDADTAASLFHPGVTIHLWDGVTFTSREEFREWFERLFSTSKDAWREIKSLEVRGDTVEVHVQLHFTLN

SEQ ID NO: 762 - protein, 158 aa, synthetic construct
GQKHTVDLTHHFHFRGNRVTEVRVHIHPRDAAAEAAVARLVAELREAFAGRIGLGERPDLRLDLTGGGPGITEEQIRQFLRRFYEALDSGDADTAASLFHPGVTIHLWDGVTFTSREEFREWFERLFSTSKDAWREIKSLEVRGDTVEVHVQLHFTLN

SEQ ID NO: 763 - protein, 158 aa, synthetic construct
GQKHTVDLTHHFHFRGNRVTEVRVHIHPTDEAARAAVAQLRATLAEAFAGRIGLGGAPDERLELGGGGPGITEEQIRQFLRRFYEALDSGDADTAASLFHPGVTIHLWDGVTFTSREEFREWFERLFSTSKDAWREIKSLEVRGDTVEVHVQLHFTLN

SEQ ID NO: 764 - protein, 158 aa, synthetic construct
GQKHTVDLTHHFHFRGNRVTEVRVHIHPTDEASRQAVERLRAILREAFAGRIGLGERPDARAYLGGGGPGITEEQIRQFLRRFYEALDSGDADTAASLFHPGVTIHLWDGVTFTSREEFREWFERLFSTSKDAWREIKSLEVRGDTVEVHVQLHFTLN

SEQ ID NO: 765 - protein, 158 aa, synthetic construct
GQKHTVDLTHHFHFRGNRVTEVRVHIHPTDEAAAAAVARLSAELREAFAGRIGLAGRPDLRPLPEGPGPGISEEQIRQFLRRFYEALDSGDADTAASLFHPGVTIHLWDGVTFTSREEFREWFERLFSTSKDAWREIKSLEVRGDTVEVHVQLHFTLN

SEQ ID NO: 766 - protein, 158 aa, synthetic construct
GQKHTVDLTHHFHFRGNRVTEVRVHIHPTDAASQAAVDRLVALAREAFAGRIGLGEREDARALLEGGGPGISEEQIRQFLRRFYEALDSGDADTAASLFHPGVTIHLWDGVTFTSREEFREWFERLFSTSKDAWREIKSLEVRGDTVEVHVQLHFTLN

SEQ ID NO: 767 - protein, 158 aa, synthetic construct
GQKHTVDLTHHFHFRGNRVTEVRVHIHPRDEASRAAVEELVARLKEAFAGRIGLGERPDERADLTGGGPGITEEQIRQFLRRFYEALDSGDADTAASLFHPGVTIHLWDGVTFTSREEFREWFERLFSTSKDAWREIKSLEVRGDTVEVHVQLHFTLN

SEQ ID NO: 768 - protein, 158 aa, synthetic construct
GQKHTVDLTHHFHFRGNRVTEVRVHITPTGPASEAAVAALRARLREAFAGRIGLGAADPAAADLTGGGPGITEEQIRQFLRRFYEALDSGDADTAASLFHPGVTIHLWDGVTFTSREEFREWFERLFSTSKDAWREIKSLEVRGDTVEVHVQLHFTLN

SEQ ID NO: 769 - protein, 158 aa, synthetic construct
GQKHTVDLTHHFHFRGNRVTEVRVHIHPTDAAAEAAVARLRALLAEAFAGRIGLGGAEDARALLEGGGPGITEEQIRQFLRRFYEALDSGDADTAASLFHPGVTIHLWDGVTFTSREEFREWFERLFSTSKDAWREIKSLEVRGDTVEVHVQLHFTLN

SEQ ID NO: 770 - protein, 159 aa, synthetic construct
GQKHTVDLTHHFHFRGNRVTEVRVHINPTTGEEEREFVRELRRELRELLLELRRLLLLLLLEEEPPEGGGPMSEEQIRQFLRRFYEALDSGDADTAASLFHPGVTIHLWDGVTFTSREEFREWFERLFSTSKDAWREIKSLEVRGDTVEVHVQLHFTLN

SEQ ID NO: 771 - protein, 159 aa, synthetic construct
GQKHTVDLTHHFHFRGNRVTEVRVHIHPTGPAAEEAVARLSREAREAVGRVLGRRAALLDDDREPEGGGPGISEEQIRQFLRRFYEALDSGDADTAASLFHPGVTIHLWDGVTFTSREEFREWFERLFSTSKDAWREIKSLEVRGDTVEVHVQLHFTLN

SEQ ID NO: 772 - protein, 159 aa, synthetic construct
GQKHTVDLTHHFHFRGNRVTEVRVHIHPTGPASQAAVDALSAANRAAVGRVLGEHAAALAAEAPPEGGGPPISEEQIRQFLRRFYEALDSGDADTAASLFHPGVTIHLWDGVTFTSREEFREWFERLFSTSKDAWREIKSLEVRGDTVEVHVQLHFTLN

SEQ ID NO: 773 - protein, 159 aa, synthetic construct
GQKHTVDLTHHFHFRGNRVTEVRVHIHPRDAASEAAVARLSAEMRAAVGRVIGRHAAALAEDAPPEGGGPPISEEQIRQFLRRFYEALDSGDADTAASLFHPGVTIHLWDGVTFTSREEFREWFERLFSTSKDAWREIKSLEVRGDTVEVHVQLHFTLN

SEQ ID NO: 774 - protein, 159 aa, synthetic construct
GQKHTVDLTHHFHFRGNRVTEVRVHIHPRGPAAQEAVDALSRRLREAVGELLGKALEAREEEAEPEGGGPGISEEQIRQFLRRFYEALDSGDADTAASLFHPGVTIHLWDGVTFTSREEFREWFERLFSTSKDAWREIKSLEVRGDTVEVHVQLHFTLN

SEQ ID NO: 775 - protein, 159 aa, synthetic construct
GQKHTVDLTHHFHFRGNRVTEVRVHIHPTNAAAEKAVAALSEKARAAVGRVIGRHAAALAAEAEPEGGGPPISEEQIRQFLRRFYEALDSGDADTAASLFHPGVTIHLWDGVTFTSREEFREWFERLFSTSKDAWREIKSLEVRGDTVEVHVQLHFTLN

SEQ ID NO: 776 - protein, 159 aa, synthetic construct
GQKHTVDLTHHFHFRGNRVTEVRVHIHPTDAAAEAAVAALSAKAREAVGRLLGRRSAPLAEEREPEGGGPPISEEQIRQFLRRFYEALDSGDADTAASLFHPGVTIHLWDGVTFTSREEFREWFERLFSTSKDAWREIKSLEVRGDTVEVHVQLHFTLN

SEQ ID NO: 777 - protein, 159 aa, synthetic construct
GQKHTVDLTHHFHFRGNRVTEVRVHIFPRDAASQEAVDRLSREMREALGAVLGRHAAALAEEREPEGGGPPISEEQIRQFLRRFYEALDSGDADTAASLFHPGVTIHLWDGVTFTSREEFREWFERLFSTSKDAWREIKSLEVRGDTVEVHVQLHFTLN

SEQ ID NO: 778 - protein, 159 aa, synthetic construct
GQKHTVDLTHHFHFRGNRVTEVRVHIHPTGPESQEAVDRLSEEMRAAVGRLIGEHAALLAEEREPEGGGPPISEEQIRQFLRRFYEALDSGDADTAASLFHPGVTIHLWDGVTFTSREEFREWFERLFSTSKDAWREIKSLEVRGDTVEVHVQLHFTLN

SEQ ID NO: 779 - protein, 159 aa, synthetic construct
GQKHTVDLTHHFHFRGNRVTEVRVHIHPTDEASRAAVAQLSAEMRAAVGALLGRRAAALSEEAEPEGGGPPISEEQIRQFLRRFYEALDSGDADTAASLFHPGVTIHLWDGVTFTSREEFREWFERLFSTSKDAWREIKSLEVRGDTVEVHVQLHFTLN

SEQ ID NO: 780 - protein, 159 aa, synthetic construct
GQKHTVDLTHHFHFRGNRVTEVRVHIYPTDEASKEAVERLSKEMREAVGRVIGRHAAALADEAEPEGGGPPISEEQIRQFLRRFYEALDSGDADTAASLFHPGVTIHLWDGVTFTSREEFREWFERLFSTSKDAWREIKSLEVRGDTVEVHVQLHFTLN

SEQ ID NO: 781 - protein, 159 aa, synthetic construct
GQKHTVDLTHHFHFRGNRVTEVRVHIHPTNEAARKAVAELSRRAREAVGRVLGRHAAAAAAEAEPEGGGPPISEEQIRQFLRRFYEALDSGDADTAASLFHPGVTIHLWDGVTFTSREEFREWFERLFSTSKDAWREIKSLEVRGDTVEVHVQLHFTLN

SEQ ID NO: 782 - protein, 159 aa, synthetic construct
GQKHTVDLTHHFHFRGNRVTEVRVHIRPRDEASQAAVARLSEEARAAVGRLLGRRAALAADDAEPVGGGPPISEEQIRQFLRRFYEALDSGDADTAASLFHPGVTIHLWDGVTFTSREEFREWFERLFSTSKDAWREIKSLEVRGDTVEVHVQLHFTLN

SEQ ID NO: 783 - protein, 159 aa, synthetic construct
GQKHTVDLTHHFHFRGNRVTEVRVHIHPTGPASEEAVARLSALSREALGRVLGRRAAALALDAEPEGGGPPISEEQIRQFLRRFYEALDSGDADTAASLFHPGVTIHLWDGVTFTSREEFREWFERLFSTSKDAWREIKSLEVRGDTVEVHVQLHFTLN

SEQ ID NO: 784 - protein, 159 aa, synthetic construct
GQKHTVDLTHHFHFRGNRVTEVRVHIFPTNEASKKAVEELSRRAREALGRVLGRHQAALAEEREPEGGGPPISEEQIRQFLRRFYEALDSGDADTAASLFHPGVTIHLWDGVTFTSREEFREWFERLFSTSKDAWREIKSLEVRGDTVEVHVQLHFTLN

SEQ ID NO: 785 - protein, 159 aa, synthetic construct
GQKHTVDLTHHFHFRGNRVTEVRVHIHPTDEASREAVERLSKEAREAVGAVIGRRAAALAADAEPVGGGPPISEEQIRQFLRRFYEALDSGDADTAASLFHPGVTIHLWDGVTFTSREEFREWFERLFSTSKDAWREIKSLEVRGDTVEVHVQLHFTLN

SEQ ID NO: 786 - protein, 159 aa, synthetic construct
GQKHTVDLTHHFHFRGNRVTEVRVHIHPTGPEAEAAVAALSRRMREAVGRVIGRHAEALELEREPEGGGPPISEEQIRQFLRRFYEALDSGDADTAASLFHPGVTIHLWDGVTFTSREEFREWFERLFSTSKDAWREIKSLEVRGDTVEVHVQLHFTLN

SEQ ID NO: 787 - protein, 159 aa, synthetic construct
GQKHTVDLTHHFHFRGNRVTEVRVHIYPTGPESQAAVERLSAEARAAVGRVIGRHAARLAEDAPPTGGGPPISEEQIRQFLRRFYEALDSGDADTAASLFHPGVTIHLWDGVTFTSREEFREWFERLFSTSKDAWREIKSLEVRGDTVEVHVQLHFTLN

SEQ ID NO: 788 - protein, 159 aa, synthetic construct
GQKHTVDLTHHFHFRGNRVTEVRVHIHPTGPASQAAVDALSARLRAAVGAVRGRHAAALAEEAEPEGGGPPISEEQIRQFLRRFYEALDSGDADTAASLFHPGVTIHLWDGVTFTSREEFREWFERLFSTSKDAWREIKSLEVRGDTVEVHVQLHFTLN

SEQ ID NO: 789 - protein, 159 aa, synthetic construct
GQKHTVDLTHHFHFRGNRVTEVRVHIHPTGPASQAAVDRLSAEARAAVGRLLGARAAALAEEAEPEGGGPPISEEQIRQFLRRFYEALDSGDADTAASLFHPGVTIHLWDGVTFTSREEFREWFERLFSTSKDAWREIKSLEVRGDTVEVHVQLHFTLN

SEQ ID NO: 790 - protein, 159 aa, synthetic construct
GQKHTVDLTHHFHFRGNRVTEVRVHIHPTDAASQAAVDQLSAEARAAVGAVLGRHAAAAAADAAPEGGGPPISEEQIRQFLRRFYEALDSGDADTAASLFHPGVTIHLWDGVTFTSREEFREWFERLFSTSKDAWREIKSLEVRGDTVEVHVQLHFTLN

SEQ ID NO: 791 - protein, 160 aa, synthetic construct
GQKHTVDLTHHFHFRGNRVTEVRVHINPTTGEEEREFVRELREELRELLLLLLLLELLLLLEELLLRPGGGPMSEEQIRQFLRRFYEALDSGDADTAASLFHPGVTIHLWDGVTFTSREEFREWFERLFSTSKDAWREIKSLEVRGDTVEVHVQLHFTLN

SEQ ID NO: 792 - protein, 160 aa, synthetic construct
GQKHTVDLTHHFHFRGNRVTEVRVHITPTDEASQAAVDRLRAVLTAAIGARAGGSLLGELEGKLERPGPGPGISEEQIRQFLRRFYEALDSGDADTAASLFHPGVTIHLWDGVTFTSREEFREWFERLFSTSKDAWREIKSLEVRGDTVEVHVQLHFTLN

SEQ ID NO: 793 - protein, 160 aa, synthetic construct
GQKHTVDLTHHFHFRGNRVTEVRVHITPRDAASQAAVEALSKVLREAIAEGVGGALLGELEGKLSRPGPGPGISEEQIRQFLRRFYEALDSGDADTAASLFHPGVTIHLWDGVTFTSREEFREWFERLFSTSKDAWREIKSLEVRGDTVEVHVQLHFTLN

SEQ ID NO: 794 - protein, 160 aa, synthetic construct
GQKHTVDLTHHFHFRGNRVTEVRVHITPTDAASEEAVKRLSAVGREALAERAGGALLGELEGRLARPGPGPGISEEQIRQFLRRFYEALDSGDADTAASLFHPGVTIHLWDGVTFTSREEFREWFERLFSTSKDAWREIKSLEVRGDTVEVHVQLHFTLN

SEQ ID NO: 795 - protein, 160 aa, synthetic construct
GQKHTVDLTHHFHFRGNRVTEVRVHITPRDAASEEAVARLRAVLTSALAEGAGGALLGELEGKLELPGPGPGISEEQIRQFLRRFYEALDSGDADTAASLFHPGVTIHLWDGVTFTSREEFREWFERLFSTSKDAWREIKSLEVRGDTVEVHVQLHFTLN

SEQ ID NO: 796 - protein, 160 aa, synthetic construct
GQKHTVDLTHHFHFRGNRVTEVRVHITPRDAAAKEAVARLSAVLREAIAAGAGGALLGALEGRLSRPGPGPPISEEQIRQFLRRFYEALDSGDADTAASLFHPGVTIHLWDGVTFTSREEFREWFERLFSTSKDAWREIKSLEVRGDTVEVHVQLHFTLN

SEQ ID NO: 797 - protein, 160 aa, synthetic construct
GQKHTVDLTHHFHFRGNRVTEVRVHIKPTDAASQAAVDRLREVGRSLLAEGAGGSLLGALEGRLERPGPGPGISEEQIRQFLRRFYEALDSGDADTAASLFHPGVTIHLWDGVTFTSREEFREWFERLFSTSKDAWREIKSLEVRGDTVEVHVQLHFTLN

SEQ ID NO: 798 - protein, 160 aa, synthetic construct
GQKHTVDLTHHFHFRGNRVTEVRVHITPTGPAAQAAVDRLSEVGRSALAEGVGGALLGALEGRLARPGPGPGISEEQIRQFLRRFYEALDSGDADTAASLFHPGVTIHLWDGVTFTSREEFREWFERLFSTSKDAWREIKSLEVRGDTVEVHVQLHFTLN

SEQ ID NO: 799 - protein, 160 aa, synthetic construct
GQKHTVDLTHHFHFRGNRVTEVRVHITPRDAAAQEAVDRLSAVVREAIGERAGGALLGALEGRLARPGPGPGISEEQIRQFLRRFYEALDSGDADTAASLFHPGVTIHLWDGVTFTSREEFREWFERLFSTSKDAWREIKSLEVRGDTVEVHVQLHFTLN

SEQ ID NO: 800 - protein, 160 aa, synthetic construct
GQKHTVDLTHHFHFRGNRVTEVRVHIRPRDAASAAAVERLSAVGRALIGEGVGGALLGSLEGRLSRPGPGPGISEEQIRQFLRRFYEALDSGDADTAASLFHPGVTIHLWDGVTFTSREEFREWFERLFSTSKDAWREIKSLEVRGDTVEVHVQLHFTLN

SEQ ID NO: 801 - protein, 160 aa, synthetic construct
GQKHTVDLTHHFHFRGNRVTEVRVHITPTGPAAQEAVDRLRAVLREALAAGVGGALLGSLEGKLARPEEGPGISEEQIRQFLRRFYEALDSGDADTAASLFHPGVTIHLWDGVTFTSREEFREWFERLFSTSKDAWREIKSLEVRGDTVEVHVQLHFTLN

SEQ ID NO: 802 - protein, 160 aa, synthetic construct
GQKHTVDLTHHFHFRGNRVTEVRVHITPTDEASKKAVDRLSAVLREAIGERVGGNLLGSLEGRLARPGPGPGISEEQIRQFLRRFYEALDSGDADTAASLFHPGVTIHLWDGVTFTSREEFREWFERLFSTSKDAWREIKSLEVRGDTVEVHVQLHFTLN

SEQ ID NO: 803 - protein, 160 aa, synthetic construct
GQKHTVDLTHHFHFRGNRVTEVRVHITPTDAASEAAVKQLSDVLRSLYGERAGGSLLGELEGKLERPEEGEPISEEQIRQFLRRFYEALDSGDADTAASLFHPGVTIHLWDGVTFTSREEFREWFERLFSTSKDAWREIKSLEVRGDTVEVHVQLHFTLN

SEQ ID NO: 804 - protein, 160 aa, synthetic construct
GQKHTVDLTHHFHFRGNRVTEVRVHITPTDEASQKAVERLSEVLRSALAEGVGGALLGELEGKLSHPGPGPGISEEQIRQFLRRFYEALDSGDADTAASLFHPGVTIHLWDGVTFTSREEFREWFERLFSTSKDAWREIKSLEVRGDTVEVHVQLHFTLN

SEQ ID NO: 805 - protein, 160 aa, synthetic construct
GQKHTVDLTHHFHFRGNRVTEVRVHITPTDAASQEAVARLRAVLREALAEGVGGALEGALEGRLARPGPGPGISEEQIRQFLRRFYEALDSGDADTAASLFHPGVTIHLWDGVTFTSREEFREWFERLFSTSKDAWREIKSLEVRGDTVEVHVQLHFTLN

SEQ ID NO: 806 - protein, 160 aa, synthetic construct
GQKHTVDLTHHFHFRGNRVTEVRVHITPTDEASQAAVERLRAVGREAIGERAGGALLGELEGRLAHPGPGPGISEEQIRQFLRRFYEALDSGDADTAASLFHPGVTIHLWDGVTFTSREEFREWFERLFSTSKDAWREIKSLEVRGDTVEVHVQLHFTLN

SEQ ID NO: 807 - protein, 160 aa, synthetic construct
GQKHTVDLTHHFHFRGNRVTEVRVHITPTGPASQAAVERLSRVLREAIAERAGGSLLGELEGKLAHPGPGPGISEEQIRQFLRRFYEALDSGDADTAASLFHPGVTIHLWDGVTFTSREEFREWFERLFSTSKDAWREIKSLEVRGDTVEVHVQLHFTLN

SEQ ID NO: 808 - protein, 160 aa, synthetic construct
GQKHTVDLTHHFHFRGNRVTEVRVHITPTGPESQAAVERLSKVGREAIGERVGGSLLEELEGRLERPGPGPGISEEQIRQFLRRFYEALDSGDADTAASLFHPGVTIHLWDGVTFTSREEFREWFERLFSTSKDAWREIKSLEVRGDTVEVHVQLHFTLN

SEQ ID NO: 809 - protein, 160 aa, synthetic construct
GQKHTVDLTHHFHFRGNRVTEVRVHITPTDEASQQAVAQLRAVLTEAIAERAGGALEGALEGKLAHPGPGPPISEEQIRQFLRRFYEALDSGDADTAASLFHPGVTIHLWDGVTFTSREEFREWFERLFSTSKDAWREIKSLEVRGDTVEVHVQLHFTLN

SEQ ID NO: 810 - protein, 160 aa, synthetic construct
GQKHTVDLTHHFHFRGNRVTEVRVHITPTDEASAAAVERLRAVGREAIAEGVGGALLGRLEGRLARPGPGPGISEEQIRQFLRRFYEALDSGDADTAASLFHPGVTIHLWDGVTFTSREEFREWFERLFSTSKDAWREIKSLEVRGDTVEVHVQLHFTLN

SEQ ID NO: 811 - protein, 160 aa, synthetic construct
GQKHTVDLTHHFHFRGNRVTEVRVHITPTDAAAQAAVERLRAVLREALGERAGGALLEALLGRLERPGPGPGISEEQIRQFLRRFYEALDSGDADTAASLFHPGVTIHLWDGVTFTSREEFREWFERLFSTSKDAWREIKSLEVRGDTVEVHVQLHFTLN

SEQ ID NO: 812 - protein, 161 aa, synthetic construct
GQKHTVDLTHHFHFRGNRVTEVRVHINPTTGEEEREFVRELREELRELLRRLRLRRLLLLLLLLLAAEEGGGPMSEEQIRQFLRRFYEALDSGDADTAASLFHPGVTIHLWDGVTFTSREEFREWFERLFSTSKDAWREIKSLEVRGDTVEVHVQLHFTLN

SEQ ID NO: 813 - protein, 161 aa, synthetic construct
GQKHTVDLTHHFHFRGNRVTEVRVHITPTDEAAQKAVNAILAKMAEFFAPLRGRRGGDAGALEARLAEGGGPPISEEQIRQFLRRFYEALDSGDADTAASLFHPGVTIHLWDGVTFTSREEFREWFERLFSTSKDAWREIKSLEVRGDTVEVHVQLHFTLN

SEQ ID NO: 814 - protein, 161 aa, synthetic construct
GQKHTVDLTHHFHFRGNRVTEVRVHITPTDEAAKKAVAALSAEMAEAFAPLRGRTGGDEEELERRLREGGGPPISEEQIRQFLRRFYEALDSGDADTAASLFHPGVTIHLWDGVTFTSREEFREWFERLFSTSKDAWREIKSLEVRGDTVEVHVQLHFTLN

SEQ ID NO: 815 - protein, 161 aa, synthetic construct
GQKHTVDLTHHFHFRGNRVTEVRVHIHPTDAAAEKAVAAMLEKLAEAFAPLRGRTGGAEGELEARLREGGGPPISEEQIRQFLRRFYEALDSGDADTAASLFHPGVTIHLWDGVTFTSREEFREWFERLFSTSKDAWREIKSLEVRGDTVEVHVQLHFTLN

SEQ ID NO: 816 - protein, 161 aa, synthetic construct
GQKHTVDLTHHFHFRGNRVTEVRVHITPTDAAAQEAVAALSAKMREFFAPLRGRRGGDEGELEEREREGGGPPISEEQIRQFLRRFYEALDSGDADTAASLFHPGVTIHLWDGVTFTSREEFREWFERLFSTSKDAWREIKSLEVRGDTVEVHVQLHFTLN

SEQ ID NO: 817 - protein, 161 aa, synthetic construct
GQKHTVDLTHHFHFRGNRVTEVRVHITPTNAAAEAAVAALSEKMAAFFAPLRGRRGGDEAELEERLREGGGPPISEEQIRQFLRRFYEALDSGDADTAASLFHPGVTIHLWDGVTFTSREEFREWFERLFSTSKDAWREIKSLEVRGDTVEVHVQLHFTLN

SEQ ID NO: 818 - protein, 161 aa, synthetic construct
GQKHTVDLTHHFHFRGNRVTEVRVHITPTDEAAKAAVAALSAKMAEAFAPLRGRTGGAEGELEEREREGGGPPISEEQIRQFLRRFYEALDSGDADTAASLFHPGVTIHLWDGVTFTSREEFREWFERLFSTSKDAWREIKSLEVRGDTVEVHVQLHFTLN

SEQ ID NO: 819 - protein, 161 aa, synthetic construct
GQKHTVDLTHHFHFRGNRVTEVRVHIEPTGPAAEAAVAALSARMREAFAPLRGRTGGDEAALEAALREGAGPPISEEQIRQFLRRFYEALDSGDADTAASLFHPGVTIHLWDGVTFTSREEFREWFERLFSTSKDAWREIKSLEVRGDTVEVHVQLHFTLN

SEQ ID NO: 820 - protein, 161 aa, synthetic construct
GQKHTVDLTHHFHFRGNRVTEVRVHITPTGPAAEAAVAALSARMREAFAPLRGRTGGAEEELERREREGGGPPISEEQIRQFLRRFYEALDSGDADTAASLFHPGVTIHLWDGVTFTSREEFREWFERLFSTSKDAWREIKSLEVRGDTVEVHVQLHFTLN

SEQ ID NO: 821 - protein, 161 aa, synthetic construct
GQKHTVDLTHHFHFRGNRVTEVRVHIHPTDAAAQAAVEALLAKMAEFFAPLRGRTGGDEGALEAAAREGGGPPISEEQIRQFLRRFYEALDSGDADTAASLFHPGVTIHLWDGVTFTSREEFREWFERLFSTSKDAWREIKSLEVRGDTVEVHVQLHFTLN

SEQ ID NO: 822 - protein, 161 aa, synthetic construct
GQKHTVDLTHHFHFRGNRVTEVRVHIYPTNEEAQKAVAELSEKMAEFFAPLRGRRGGAEGELEEREREGGGPPISEEQIRQFLRRFYEALDSGDADTAASLFHPGVTIHLWDGVTFTSREEFREWFERLFSTSKDAWREIKSLEVRGDTVEVHVQLHFTLN

SEQ ID NO: 823 - protein, 161 aa, synthetic construct
GQKHTVDLTHHFHFRGNRVTEVRVHIHPTDPAAQAAVEALSAAMREAFAPLRGRRGGAEGELEERLREGGGPPISEEQIRQFLRRFYEALDSGDADTAASLFHPGVTIHLWDGVTFTSREEFREWFERLFSTSKDAWREIKSLEVRGDTVEVHVQLHFTLN

SEQ ID NO: 824 - protein, 161 aa, synthetic construct
GQKHTVDLTHHFHFRGNRVTEVRVHIHPTGPEAQAAVDALSARMAEFFAPLRGRRGGDAGALEAALREGGGPPISEEQIRQFLRRFYEALDSGDADTAASLFHPGVTIHLWDGVTFTSREEFREWFERLFSTSKDAWREIKSLEVRGDTVEVHVQLHFTLN

SEQ ID NO: 825 - protein, 161 aa, synthetic construct
GQKHTVDLTHHFHFRGNRVTEVRVHITPTGPAAEAAVAALSARMREAFAPLRGRTGGDEGALEARLREGSGPPISEEQIRQFLRRFYEALDSGDADTAASLFHPGVTIHLWDGVTFTSREEFREWFERLFSTSKDAWREIKSLEVRGDTVEVHVQLHFTLN

SEQ ID NO: 826 - protein, 161 aa, synthetic construct
GQKHTVDLTHHFHFRGNRVTEVRVHIHPTDEAAKAAVARLSEEMREAFAPLRGRTGGDAEELEARRREGGGPPISEEQIRQFLRRFYEALDSGDADTAASLFHPGVTIHLWDGVTFTSREEFREWFERLFSTSKDAWREIKSLEVRGDTVEVHVQLHFTLN

SEQ ID NO: 827 - protein, 161 aa, synthetic construct
GQKHTVDLTHHFHFRGNRVTEVRVHIHPTDEAAREAVAALSARMREAFAPLRGRRGGDEGELEERAAEGGGPPISEEQIRQFLRRFYEALDSGDADTAASLFHPGVTIHLWDGVTFTSREEFREWFERLFSTSKDAWREIKSLEVRGDTVEVHVQLHFTLN

SEQ ID NO: 828 - protein, 161 aa, synthetic construct
GQKHTVDLTHHFHFRGNRVTEVRVHITPTGPAAEAAVAALREEMAAFFAPLRGRRGGDEGALEERRREGEGPPISEEQIRQFLRRFYEALDSGDADTAASLFHPGVTIHLWDGVTFTSREEFREWFERLFSTSKDAWREIKSLEVRGDTVEVHVQLHFTLN

SEQ ID NO: 829 - protein, 161 aa, synthetic construct
GQKHTVDLTHHFHFRGNRVTEVRVHITPTDAAAQAAVDALSAEMAEAFAPLRGRTGGLEAELEEREREGEGPPISEEQIRQFLRRFYEALDSGDADTAASLFHPGVTIHLWDGVTFTSREEFREWFERLFSTSKDAWREIKSLEVRGDTVEVHVQLHFTLN

SEQ ID NO: 830 - protein, 161 aa, synthetic construct
GQKHTVDLTHHFHFRGNRVTEVRVHIHPTGPAAEAAVAALSERMRAAFAPLRGRTGGAAGELEARLREGGGPPISEEQIRQFLRRFYEALDSGDADTAASLFHPGVTIHLWDGVTFTSREEFREWFERLFSTSKDAWREIKSLEVRGDTVEVHVQLHFTLN

SEQ ID NO: 831 - protein, 161 aa, synthetic construct
GQKHTVDLTHHFHFRGNRVTEVRVHITPTGPAAEKAVNSLLAKMREFFAPLRGRTGGAAAELEAAAREGGGPPISEEQIRQFLRRFYEALDSGDADTAASLFHPGVTIHLWDGVTFTSREEFREWFERLFSTSKDAWREIKSLEVRGDTVEVHVQLHFTLN

SEQ ID NO: 832 - protein, 161 aa, synthetic construct
GQKHTVDLTHHFHFRGNRVTEVRVHIAPTGPAAQAAVDALLEKMAEAFAPLRGRTGGAEGELEERRREGGGPPISEEQIRQFLRRFYEALDSGDADTAASLFHPGVTIHLWDGVTFTSREEFREWFERLFSTSKDAWREIKSLEVRGDTVEVHVQLHFTLN

SEQ ID NO: 833 - protein, 162 aa, synthetic construct
GQKHTVDLTHHFHFRGNRVTEVRVHINPTTGEEEREFVRELLRELRELLRLLLLLRLLRLRLLRLEEERPPGGPMSEEQIRQFLRRFYEALDSGDADTAASLFHPGVTIHLWDGVTFTSREEFREWFERLFSTSKDAWREIKSLEVRGDTVEVHVQLHFTLN

SEQ ID NO: 834 - protein, 162 aa, synthetic construct
GQKHTVDLTHHFHFRGNRVTEVRVHIAPKDAAAQAAIDALRAEYGAEGGRTALLLSRGAGTEEAVELVPSGPGEIPEEQIRQFLRRFYEALDSGDADTAASLFHPGVTIHLWDGVTFTSREEFREWFERLFSTSKDAWREIKSLEVRGDTVEVHVQLHFTLN

SEQ ID NO: 835 - protein, 162 aa, synthetic construct
GQKHTVDLTHHFHFRGNRVTEVRVHIHPQGEAAQAAIDALREKYGAEGGRTALTMARGKGTEDAVELVPSGPGEIPEEQIRQFLRRFYEALDSGDADTAASLFHPGVTIHLWDGVTFTSREEFREWFERLFSTSKDAWREIKSLEVRGDTVEVHVQLHFTLN

SEQ ID NO: 836 - protein, 162 aa, synthetic construct
GQKHTVDLTHHFHFRGNRVTEVRVHIAPRDEAAQAGLERLRAEEGAKGGRLALLAARGAGTEDAVELVPSGPGEIPEEQIRQFLRRFYEALDSGDADTAASLFHPGVTIHLWDGVTFTSREEFREWFERLFSTSKDAWREIKSLEVRGDTVEVHVQLHFTLN

SEQ ID NO: 837 - protein, 162 aa, synthetic construct
GQKHTVDLTHHFHFRGNRVTEVRVHIHPKGPAAQAAIERLRAEEGARGGRRALLLWRGAGTEDAVELTPSGPGEIPEEQIRQFLRRFYEALDSGDADTAASLFHPGVTIHLWDGVTFTSREEFREWFERLFSTSKDAWREIKSLEVRGDTVEVHVQLHFTLN

SEQ ID NO: 838 - protein, 162 aa, synthetic construct
GQKHTVDLTHHFHFRGNRVTEVRVHIHPQGPAAQAAIDQLRAEFGALGGQTALLLSRGGGTEDAVELVPSGPGEIPEEQIRQFLRRFYEALDSGDADTAASLFHPGVTIHLWDGVTFTSREEFREWFERLFSTSKDAWREIKSLEVRGDTVEVHVQLHFTLN

SEQ ID NO: 839 - protein, 162 aa, synthetic construct
GQKHTVDLTHHFHFRGNRVTEVRVHIHPQGPAAQAALDQLRARYGAEGGRTALLLARGGGREDRVRLVPSGPPEIPEEQIRQFLRRFYEALDSGDADTAASLFHPGVTIHLWDGVTFTSREEFREWFERLFSTSKDAWREIKSLEVRGDTVEVHVQLHFTLN

SEQ ID NO: 840 - protein, 162 aa, synthetic construct
GQKHTVDLTHHFHFRGNRVTEVRVHIQPQGPAAQAAIDALRARFGAEGGRTALLLARGGGTEDAVELVPSGPPEIPEEQIRQFLRRFYEALDSGDADTAASLFHPGVTIHLWDGVTFTSREEFREWFERLFSTSKDAWREIKSLEVRGDTVEVHVQLHFTLN

SEQ ID NO: 841 - protein, 162 aa, synthetic construct
GQKHTVDLTHHFHFRGNRVTEVRVHIHPRDAAAQAGIERLRAEFGAEGGRTALLLARGAGTEDAVTLVPSGPGEIPEEQIRQFLRRFYEALDSGDADTAASLFHPGVTIHLWDGVTFTSREEFREWFERLFSTSKDAWREIKSLEVRGDTVEVHVQLHFTLN

SEQ ID NO: 842 - protein, 162 aa, synthetic construct
GQKHTVDLTHHFHFRGNRVTEVRVHIAPQGPAAQAGIEQLRATYGAEGGQTALQVARGGGLEDAVELVPSGPGEIPEEQIRQFLRRFYEALDSGDADTAASLFHPGVTIHLWDGVTFTSREEFREWFERLFSTSKDAWREIKSLEVRGDTVEVHVQLHFTLN

SEQ ID NO: 843 - protein, 162 aa, synthetic construct
GQKHTVDLTHHFHFRGNRVTEVRVHIAPQDEAAQKAIDALRAEEGALGGRTALLLARGAGLEDNVELVPSGPGEIPEEQIRQFLRRFYEALDSGDADTAASLFHPGVTIHLWDGVTFTSREEFREWFERLFSTSKDAWREIKSLEVRGDTVEVHVQLHFTLN

SEQ ID NO: 844 - protein, 162 aa, synthetic construct
GQKHTVDLTHHFHFRGNRVTEVRVHIHPKDAAAQAALEQLLAKYGAEGGQRALLLSRGAGREDRVELRPSGPGEIPEEQIRQFLRRFYEALDSGDADTAASLFHPGVTIHLWDGVTFTSREEFREWFERLFSTSKDAWREIKSLEVRGDTVEVHVQLHFTLN

SEQ ID NO: 845 - protein, 162 aa, synthetic construct
GQKHTVDLTHHFHFRGNRVTEVRVHIAPRDAAAQAALDQLRATFGAEGGRTALLLARGGGTEDAVELVPSGPGEIPEEQIRQFLRRFYEALDSGDADTAASLFHPGVTIHLWDGVTFTSREEFREWFERLFSTSKDAWREIKSLEVRGDTVEVHVQLHFTLN

SEQ ID NO: 846 - protein, 162 aa, synthetic construct
GQKHTVDLTHHFHFRGNRVTEVRVHIHPQGPAAQKAIDQLRQQFGAEGGRTALLLSRGGGTEDNVELVPSGPGEIPEEQIRQFLRRFYEALDSGDADTAASLFHPGVTIHLWDGVTFTSREEFREWFERLFSTSKDAWREIKSLEVRGDTVEVHVQLHFTLN

SEQ ID NO: 847 - protein, 162 aa, synthetic construct
GQKHTVDLTHHFHFRGNRVTEVRVHIAPQDEAAQAAIDALRAKYGAEGGLTALLLDRGRGTEDRVTLVPSGPGEIPEEQIRQFLRRFYEALDSGDADTAASLFHPGVTIHLWDGVTFTSREEFREWFERLFSTSKDAWREIKSLEVRGDTVEVHVQLHFTLN

SEQ ID NO: 848 - protein, 162 aa, synthetic construct
GQKHTVDLTHHFHFRGNRVTEVRVHIHPQGPAAQAALDRLLAEEGARGGRTALLLARGGGTEDAVELVPSGAPEIPEEQIRQFLRRFYEALDSGDADTAASLFHPGVTIHLWDGVTFTSREEFREWFERLFSTSKDAWREIKSLEVRGDTVEVHVQLHFTLN

SEQ ID NO: 849 - protein, 162 aa, synthetic construct
GQKHTVDLTHHFHFRGNRVTEVRVHIHPQGPAAQAAIDALAAEYGAEGGRRALQLARGAGTEEAVELVPSEAPEIPEEQIRQFLRRFYEALDSGDADTAASLFHPGVTIHLWDGVTFTSREEFREWFERLFSTSKDAWREIKSLEVRGDTVEVHVQLHFTLN

SEQ ID NO: 850 - protein, 162 aa, synthetic construct
GQKHTVDLTHHFHFRGNRVTEVRVHIHPQGPAAQAGIDALRARFGAEGGRTALLVARGGGTEDSVVLTPSGPGEIPEEQIRQFLRRFYEALDSGDADTAASLFHPGVTIHLWDGVTFTSREEFREWFERLFSTSKDAWREIKSLEVRGDTVEVHVQLHFTLN

SEQ ID NO: 851 - protein, 162 aa, synthetic construct
GQKHTVDLTHHFHFRGNRVTEVRVHIHPRDAAAQAAIDALRAEFGAAGGRTALLLARGAGSEDAVRLVPSGPGEIPEEQIRQFLRRFYEALDSGDADTAASLFHPGVTIHLWDGVTFTSREEFREWFERLFSTSKDAWREIKSLEVRGDTVEVHVQLHFTLN

SEQ ID NO: 852 - protein, 162 aa, synthetic construct
GQKHTVDLTHHFHFRGNRVTEVRVHIHPQDAAAQQAIDQLRAEEGALGGRRALQLWRGGGTEDAVELVPSGPPEIPEEQIRQFLRRFYEALDSGDADTAASLFHPGVTIHLWDGVTFTSREEFREWFERLFSTSKDAWREIKSLEVRGDTVEVHVQLHFTLN

SEQ ID NO: 853 - protein, 162 aa, synthetic construct
GQKHTVDLTHHFHFRGNRVTEVRVHIAPQDAAAQAALDALRARFGAEGGRTALLLDRGAGSEDAVELRPSGPGEMPEEQIRQFLRRFYEALDSGDADTAASLFHPGVTIHLWDGVTFTSREEFREWFERLFSTSKDAWREIKSLEVRGDTVEVHVQLHFTLN

SEQ ID NO: 854 - protein, 163 aa, synthetic construct
GQKHTVDLTHHFHFRGNRVTEVRVHINPTTGEEEREFVRELLEELLEELRRRLRLREEEERELLLEEEEEPPPPPMSEEQIRQFLRRFYEALDSGDADTAASLFHPGVTIHLWDGVTFTSREEFREWFERLFSTSKDAWREIKSLEVRGDTVEVHVQLHFTLN

SEQ ID NO: 855 - protein, 163 aa, synthetic construct
GQKHTVDLTHHFHFRGNRVTEVRVHITPTDAAAQAAVEQLVEKTFADIWGEFRPRAGAEAEALVGAAEPDEPREPISEEQIRQFLRRFYEALDSGDADTAASLFHPGVTIHLWDGVTFTSREEFREWFERLFSTSKDAWREIKSLEVRGDTVEVHVQLHFTLN

SEQ ID NO: 856 - protein, 163 aa, synthetic construct
GQKHTVDLTHHFHFRGNRVTEVRVHIKPTGPEAEKAVEQLVKETFSDIWGEFAPNAGKLAEALEGAEEPEEPREPISEEQIRQFLRRFYEALDSGDADTAASLFHPGVTIHLWDGVTFTSREEFREWFERLFSTSKDAWREIKSLEVRGDTVEVHVQLHFTLN

SEQ ID NO: 857 - protein, 163 aa, synthetic construct
GQKHTVDLTHHFHFRGNRVTEVRVHIKPTDEAAKAAVDQLVKETFADIWGEFAPLAGKLADALVGAEEPPEPREPISEEQIRQFLRRFYEALDSGDADTAASLFHPGVTIHLWDGVTFTSREEFREWFERLFSTSKDAWREIKSLEVRGDTVEVHVQLHFTLN

SEQ ID NO: 858 - protein, 163 aa, synthetic construct
GQKHTVDLTHHFHFRGNRVTEVRVHIRPTDAAAEAAVKELVEKTLSDIWGEFAPRAGREAEALVGAEEPDEPSEPISEEQIRQFLRRFYEALDSGDADTAASLFHPGVTIHLWDGVTFTSREEFREWFERLFSTSKDAWREIKSLEVRGDTVEVHVQLHFTLN

SEQ ID NO: 859 - protein, 163 aa, synthetic construct
GQKHTVDLTHHFHFRGNRVTEVRVHIEPTDEAAEKAVKELVEKTFSDIWGEFKPLAGKLAEALRGAAEPPEPSEPISEEQIRQFLRRFYEALDSGDADTAASLFHPGVTIHLWDGVTFTSREEFREWFERLFSTSKDAWREIKSLEVRGDTVEVHVQLHFTLN

SEQ ID NO: 860 - protein, 163 aa, synthetic construct
GQKHTVDLTHHFHFRGNRVTEVRVHIRPTGPAAQEAVDTLVEKTFSDIWGEFAHRRGEEAEALLGAEEPDEPSEPISEEQIRQFLRRFYEALDSGDADTAASLFHPGVTIHLWDGVTFTSREEFREWFERLFSTSKDAWREIKSLEVRGDTVEVHVQLHFTLN

SEQ ID NO: 861 - protein, 163 aa, synthetic construct
GQKHTVDLTHHFHFRGNRVTEVRVHITPTDAAAQAAVDQLVEKTFSDIWGEFRPNAGKLAEALRGAAEPPEPREPISEEQIRQFLRRFYEALDSGDADTAASLFHPGVTIHLWDGVTFTSREEFREWFERLFSTSKDAWREIKSLEVRGDTVEVHVQLHFTLN

SEQ ID NO: 862 - protein, 163 aa, synthetic construct
GQKHTVDLTHHFHFRGNRVTEVRVHIEPTDAAAQAAVEQLVEATFADIWGEFAPLRGRLAEALRGAAAPPEPSEPISEEQIRQFLRRFYEALDSGDADTAASLFHPGVTIHLWDGVTFTSREEFREWFERLFSTSKDAWREIKSLEVRGDTVEVHVQLHFTLN

SEQ ID NO: 863 - protein, 163 aa, synthetic construct
GQKHTVDLTHHFHFRGNRVTEVRVHIEPTGPAAQEAVDQLVKETFADIWGEFAPLRGALAEALRGAAEPPEPREPISEEQIRQFLRRFYEALDSGDADTAASLFHPGVTIHLWDGVTFTSREEFREWFERLFSTSKDAWREIKSLEVRGDTVEVHVQLHFTLN

SEQ ID NO: 864 - protein, 163 aa, synthetic construct
GQKHTVDLTHHFHFRGNRVTEVRVHIRPRGPAAQKAVDELVEKTFSDIWGEFAPRRGKEAEALVGAEEPPEPREPISEEQIRQFLRRFYEALDSGDADTAASLFHPGVTIHLWDGVTFTSREEFREWFERLFSTSKDAWREIKSLEVRGDTVEVHVQLHFTLN

SEQ ID NO: 865 - protein, 163 aa, synthetic construct
GQKHTVDLTHHFHFRGNRVTEVRVHITPTGPAAQEAVDQLVKATFSDIWGEFEKNRGKLAEALVGAEEPEEPSEPISEEQIRQFLRRFYEALDSGDADTAASLFHPGVTIHLWDGVTFTSREEFREWFERLFSTSKDAWREIKSLEVRGDTVEVHVQLHFTLN

SEQ ID NO: 866 - protein, 163 aa, synthetic construct
GQKHTVDLTHHFHFRGNRVTEVRVHIFPTDEAAKAAVDELVEKTFADIWGEFAPNRGKLAEALVGAAEPPEPREPISEEQIRQFLRRFYEALDSGDADTAASLFHPGVTIHLWDGVTFTSREEFREWFERLFSTSKDAWREIKSLEVRGDTVEVHVQLHFTLN

SEQ ID NO: 867 - protein, 163 aa, synthetic construct
GQKHTVDLTHHFHFRGNRVTEVRVHITPTDEAAKAAVDALVKATFADIWGEFAPNAGKLAEALVGAEEPPEPREPISEEQIRQFLRRFYEALDSGDADTAASLFHPGVTIHLWDGVTFTSREEFREWFERLFSTSKDAWREIKSLEVRGDTVEVHVQLHFTLN

SEQ ID NO: 868 - protein, 163 aa, synthetic construct
GQKHTVDLTHHFHFRGNRVTEVRVHIRPTDAAAEAAVRQLVEKTFSDIWGEFAHLAGRLAEALVGAEEPPEPREPISEEQIRQFLRRFYEALDSGDADTAASLFHPGVTIHLWDGVTFTSREEFREWFERLFSTSKDAWREIKSLEVRGDTVEVHVQLHFTLN

SEQ ID NO: 869 - protein, 163 aa, synthetic construct
GQKHTVDLTHHFHFRGNRVTEVRVHIAPTDEASQAAVDRLVEETFADVWGEFRPLAGRLAEALLGAEEPDEPREPISEEQIRQFLRRFYEALDSGDADTAASLFHPGVTIHLWDGVTFTSREEFREWFERLFSTSKDAWREIKSLEVRGDTVEVHVQLHFTLN

SEQ ID NO: 870 - protein, 163 aa, synthetic construct
GQKHTVDLTHHFHFRGNRVTEVRVHIEPTDAAAQAAVEQLVQATFADVWGEFAPLAGRLAEALRGAAAPDEPAEPISEEQIRQFLRRFYEALDSGDADTAASLFHPGVTIHLWDGVTFTSREEFREWFERLFSTSKDAWREIKSLEVRGDTVEVHVQLHFTLN

SEQ ID NO: 871 - protein, 163 aa, synthetic construct
GQKHTVDLTHHFHFRGNRVTEVRVHIEPTDEASEKAVEELVKKTLSDIWGEVKENAGKLAEALRGAAEPPEPREPISEEQIRQFLRRFYEALDSGDADTAASLFHPGVTIHLWDGVTFTSREEFREWFERLFSTSKDAWREIKSLEVRGDTVEVHVQLHFTLN

SEQ ID NO: 872 - protein, 163 aa, synthetic construct
GQKHTVDLTHHFHFRGNRVTEVRVHIRPTDAAAQAAVDTLVEKTFSDIWGEFAPNRGKLAEALVGAEEPPEPREPISEEQIRQFLRRFYEALDSGDADTAASLFHPGVTIHLWDGVTFTSREEFREWFERLFSTSKDAWREIKSLEVRGDTVEVHVQLHFTLN

SEQ ID NO: 873 - protein, 163 aa, synthetic construct
GQKHTVDLTHHFHFRGNRVTEVRVHITPTDEAAAAAVRELVERTFADIWGERAPLAGRLAEALRGAAAPEEPAEPISEEQIRQFLRRFYEALDSGDADTAASLFHPGVTIHLWDGVTFTSREEFREWFERLFSTSKDAWREIKSLEVRGDTVEVHVQLHFTLN

SEQ ID NO: 874 - protein, 163 aa, synthetic construct
GQKHTVDLTHHFHFRGNRVTEVRVHIRPTDAAAEAAVQALVEATFADIWGEFAPLAGKLADALVGAEEPEEPREPISEEQIRQFLRRFYEALDSGDADTAASLFHPGVTIHLWDGVTFTSREEFREWFERLFSTSKDAWREIKSLEVRGDTVEVHVQLHFTLN

SEQ ID NO: 875 - protein, 164 aa, synthetic construct
GQKHTVDLTHHFHFRGNRVTEVRVHINPTTGEEEREFVRELLRELGGGLLELLLLLLLLLLEELEELELEEGGGGPMSEEQIRQFLRRFYEALDSGDADTAASLFHPGVTIHLWDGVTFTSREEFREWFERLFSTSKDAWREIKSLEVRGDTVEVHVQLHFTLN

SEQ ID NO: 876 - protein, 164 aa, synthetic construct
GQKHTVDLTHHFHFRGNRVTEVRVHIHPTGPAAAEAVRRLVASRGGELVDARLEETLGTGRELWPAPEIVGGGGPGITEEQIRQFLRRFYEALDSGDADTAASLFHPGVTIHLWDGVTFTSREEFREWFERLFSTSKDAWREIKSLEVRGDTVEVHVQLHFTLN

SEQ ID NO: 877 - protein, 164 aa, synthetic construct
GQKHTVDLTHHFHFRGNRVTEVRVHIHPTDEAAVAAVRQLVAALGGALVEEHVEATFGTGRELAPAPEIVGGGGPGITEEQIRQFLRRFYEALDSGDADTAASLFHPGVTIHLWDGVTFTSREEFREWFERLFSTSKDAWREIKSLEVRGDTVEVHVQLHFTLN

SEQ ID NO: 878 - protein, 164 aa, synthetic construct
GQKHTVDLTHHFHFRGNRVTEVRVHIHPTDEAAKEAVRELIEKLGGELAKEHIEETYGKGKELLPEPEIRGGPGPGISEEQIRQFLRRFYEALDSGDADTAASLFHPGVTIHLWDGVTFTSREEFREWFERLFSTSKDAWREIKSLEVRGDTVEVHVQLHFTLN

SEQ ID NO: 879 - protein, 164 aa, synthetic construct
GQKHTVDLTHHFHFRGNRVTEVRVHIHPTDEAAAAAVRRLIESLGGGLVERRLEETYGRGLELRPEPEIVGEGGPGITEEQIRQFLRRFYEALDSGDADTAASLFHPGVTIHLWDGVTFTSREEFREWFERLFSTSKDAWREIKSLEVRGDTVEVHVQLHFTLN

SEQ ID NO: 880 - protein, 164 aa, synthetic construct
GQKHTVDLTHHFHFRGNRVTEVRVHIHPTDEAAVEAVRRLIAALGGELAEERIERTYGKGVEEDPAPAIVGGPGPGITEEQIRQFLRRFYEALDSGDADTAASLFHPGVTIHLWDGVTFTSREEFREWFERLFSTSKDAWREIKSLEVRGDTVEVHVQLHFTLN

SEQ ID NO: 881 - protein, 164 aa, synthetic construct
GQKHTVDLTHHFHFRGNRVTEVRVHIHPTDEAAREAVRELIARLGGELAEEHIEATYGKGLELRPEREIVGAGGPGISEEQIRQFLRRFYEALDSGDADTAASLFHPGVTIHLWDGVTFTSREEFREWFERLFSTSKDAWREIKSLEVRGDTVEVHVQLHFTLN

SEQ ID NO: 882 - protein, 164 aa, synthetic construct
GQKHTVDLTHHFHFRGNRVTEVRVHIHPTDEAAREAVRRLVEALGGELVERRLEETYGTGRELWPEPRIVGGPGPGITEEQIRQFLRRFYEALDSGDADTAASLFHPGVTIHLWDGVTFTSREEFREWFERLFSTSKDAWREIKSLEVRGDTVEVHVQLHFTLN

SEQ ID NO: 883 - protein, 164 aa, synthetic construct
GQKHTVDLTHHFHFRGNRVTEVRVHIHPRDEAAAEAVRALVARLGGERVEERLEATYGRGLELDPAPAIVGAGGPGITEEQIRQFLRRFYEALDSGDADTAASLFHPGVTIHLWDGVTFTSREEFREWFERLFSTSKDAWREIKSLEVRGDTVEVHVQLHFTLN

SEQ ID NO: 884 - protein, 164 aa, synthetic construct
GQKHTVDLTHHFHFRGNRVTEVRVHIHPTDEAAVEAVRRLVEKLGGGLVEERVERTFGTGERLWPAPEIVGGPGPGITEEQIRQFLRRFYEALDSGDADTAASLFHPGVTIHLWDGVTFTSREEFREWFERLFSTSKDAWREIKSLEVRGDTVEVHVQLHFTLN

SEQ ID NO: 885 - protein, 164 aa, synthetic construct
GQKHTVDLTHHFHFRGNRVTEVRVHIHPTDEAARAAVRALVAALGGGLVAERLEATYGTGLELWPEPEIRGGPGPGITEEQIRQFLRRFYEALDSGDADTAASLFHPGVTIHLWDGVTFTSREEFREWFERLFSTSKDAWREIKSLEVRGDTVEVHVQLHFTLN

SEQ ID NO: 886 - protein, 164 aa, synthetic construct
GQKHTVDLTHHFHFRGNRVTEVRVHIHPTDEAAKEAVRRLVESLGGELAEEHIERTFGTGEELEPAPRIEGGGGPSISEEQIRQFLRRFYEALDSGDADTAASLFHPGVTIHLWDGVTFTSREEFREWFERLFSTSKDAWREIKSLEVRGDTVEVHVQLHFTLN

SEQ ID NO: 887 - protein, 164 aa, synthetic construct
GQKHTVDLTHHFHFRGNRVTEVRVHIHPTDEAAVEAVRKLVESLGGELVEERINRTFGKGLELWPEPEIVGGPGPGISEEQIRQFLRRFYEALDSGDADTAASLFHPGVTIHLWDGVTFTSREEFREWFERLFSTSKDAWREIKSLEVRGDTVEVHVQLHFTLN

SEQ ID NO: 888 - protein, 164 aa, synthetic construct
GQKHTVDLTHHFHFRGNRVTEVRVHIHPTDEASVEAVRRLVESLGGELVEEHIERTFGTGEELRPEPEIRGAGGPGITEEQIRQFLRRFYEALDSGDADTAASLFHPGVTIHLWDGVTFTSREEFREWFERLFSTSKDAWREIKSLEVRGDTVEVHVQLHFTLN

SEQ ID NO: 889 - protein, 164 aa, synthetic construct
GQKHTVDLTHHFHFRGNRVTEVRVHIHPTDEAAVEAVRQLVEKLGGELAEKHIEETFGTGKELWPEPEIRGGPGPGISEEQIRQFLRRFYEALDSGDADTAASLFHPGVTIHLWDGVTFTSREEFREWFERLFSTSKDAWREIKSLEVRGDTVEVHVQLHFTLN

SEQ ID NO: 890 - protein, 164 aa, synthetic construct
GQKHTVDLTHHFHFRGNRVTEVRVHIHPTDEAAVEAVRKLIESLGGELAKERIEATFGTGEELDPAPAITGGGGPGISEEQIRQFLRRFYEALDSGDADTAASLFHPGVTIHLWDGVTFTSREEFREWFERLFSTSKDAWREIKSLEVRGDTVEVHVQLHFTLN

SEQ ID NO: 891 - protein, 164 aa, synthetic construct
GQKHTVDLTHHFHFRGNRVTEVRVHIHPTGPAAVAAVRRLVASLGGALAEERIEATYGTGLELDPAAEITGGPGPGISEEQIRQFLRRFYEALDSGDADTAASLFHPGVTIHLWDGVTFTSREEFREWFERLFSTSKDAWREIKSLEVRGDTVEVHVQLHFTLN

SEQ ID NO: 892 - protein, 164 aa, synthetic construct
GQKHTVDLTHHFHFRGNRVTEVRVHIHPTDEAAVEAVRKLVEKLGGELADKRINETFGTGVELDPAPELTGEGGPGITEEQIRQFLRRFYEALDSGDADTAASLFHPGVTIHLWDGVTFTSREEFREWFERLFSTSKDAWREIKSLEVRGDTVEVHVQLHFTLN

SEQ ID NO: 893 - protein, 164 aa, synthetic construct
GQKHTVDLTHHFHFRGNRVTEVRVHIHPTDEAAAEAVRRLVASLGGELVEERLEATFGTGKVLDPDPEIVGGPGPSITEEQIRQFLRRFYEALDSGDADTAASLFHPGVTIHLWDGVTFTSREEFREWFERLFSTSKDAWREIKSLEVRGDTVEVHVQLHFTLN

SEQ ID NO: 894 - protein, 164 aa, synthetic construct
GQKHTVDLTHHFHFRGNRVTEVRVHIHPTDEAAAEAVRRLVEKLGGGLVEERLEETFGKGLRLWPEPEIRGGGGPGISEEQIRQFLRRFYEALDSGDADTAASLFHPGVTIHLWDGVTFTSREEFREWFERLFSTSKDAWREIKSLEVRGDTVEVHVQLHFTLN

SEQ ID NO: 895 - protein, 164 aa, synthetic construct
GQKHTVDLTHHFHFRGNRVTEVRVHIHPTDEAAREAVRRLIEKLGGELAREHIERVYGKGEELWPAPEIVGAGGPGITEEQIRQFLRRFYEALDSGDADTAASLFHPGVTIHLWDGVTFTSREEFREWFERLFSTSKDAWREIKSLEVRGDTVEVHVQLHFTLN

SEQ ID NO: 896 - protein, 165 aa, synthetic construct
GQKHTVDLTHHFHFRGNRVTEVRVHINPTTGEEEREFVRELLRELGGGLELLLLLLLLLLLLLLLLLEPPPPPPPGPMSEEQIRQFLRRFYEALDSGDADTAASLFHPGVTIHLWDGVTFTSREEFREWFERLFSTSKDAWREIKSLEVRGDTVEVHVQLHFTLN

SEQ ID NO: 897 - protein, 165 aa, synthetic construct
GQKHTVDLTHHFHFRGNRVTEVRVHIKPTDEAAAQALIKMVEEARGEGVAARLAERLRTGADALPDDVEWPEMPGPGISEEQIRQFLRRFYEALDSGDADTAASLFHPGVTIHLWDGVTFTSREEFREWFERLFSTSKDAWREIKSLEVRGDTVEVHVQLHFTLN

SEQ ID NO: 898 - protein, 165 aa, synthetic construct
GQKHTVDLTHHFHFRGNRVTEVRVHIKPKDKASAEALIEIVRKARGGEVAERLAARLEENAEELPVDVEWPEQEGPGISEEQIRQFLRRFYEALDSGDADTAASLFHPGVTIHLWDGVTFTSREEFREWFERLFSTSKDAWREIKSLEVRGDTVEVHVQLHFTLN

SEQ ID NO: 899 - protein, 165 aa, synthetic construct
GQKHTVDLTHHFHFRGNRVTEVRVHIRPRDAAAAEALIEMLEKARGEEHTARLAARLRENASELPVDVEWPEEEGPGISEEQIRQFLRRFYEALDSGDADTAASLFHPGVTIHLWDGVTFTSREEFREWFERLFSTSKDAWREIKSLEVRGDTVEVHVQLHFTLN

SEQ ID NO: 900 - protein, 165 aa, synthetic construct
GQKHTVDLTHHFHFRGNRVTEVRVHIRPRDAAAAEALVEILRAARGEGAAERLARRLREDADALPVDVEWPVQPGPGITEEQIRQFLRRFYEALDSGDADTAASLFHPGVTIHLWDGVTFTSREEFREWFERLFSTSKDAWREIKSLEVRGDTVEVHVQLHFTLN

SEQ ID NO: 901 - protein, 165 aa, synthetic construct
GQKHTVDLTHHFHFRGNRVTEVRVHIRPRDEAARQALVEMLRAARGEGYAARLAARLEEGAEELPVDVEVPEMPGPGISEEQIRQFLRRFYEALDSGDADTAASLFHPGVTIHLWDGVTFTSREEFREWFERLFSTSKDAWREIKSLEVRGDTVEVHVQLHFTLN

SEQ ID NO: 902 - protein, 165 aa, synthetic construct
GQKHTVDLTHHFHFRGNRVTEVRVHIRPRDEAAAEALIEMLKKARGEGKAERLAERLRTGLEELPVDVEWPEMPGPGISEEQIRQFLRRFYEALDSGDADTAASLFHPGVTIHLWDGVTFTSREEFREWFERLFSTSKDAWREIKSLEVRGDTVEVHVQLHFTLN

SEQ ID NO: 903 - protein, 165 aa, synthetic construct
GQKHTVDLTHHFHFRGNRVTEVRVHIRPTSEEAAKALIEMMKKTRGEEHTERLAERLEKELEKLPDDVEWPEQPGPGISEEQIRQFLRRFYEALDSGDADTAASLFHPGVTIHLWDGVTFTSREEFREWFERLFSTSKDAWREIKSLEVRGDTVEVHVQLHFTLN

SEQ ID NO: 904 - protein, 165 aa, synthetic construct
GQKHTVDLTHHFHFRGNRVTEVRVHIRPRDEAAAAAVVEITRKTFGGEVTERLARRLREGADELPVDVEVPTQPGPGISEEQIRQFLRRFYEALDSGDADTAASLFHPGVTIHLWDGVTFTSREEFREWFERLFSTSKDAWREIKSLEVRGDTVEVHVQLHFTLN

SEQ ID NO: 905 - protein, 165 aa, synthetic construct
GQKHTVDLTHHFHFRGNRVTEVRVHIRPTSPAAAAAVVEMAKKTFGEERTARLAARLEEGADALPVDVEWPEMEGPGISEEQIRQFLRRFYEALDSGDADTAASLFHPGVTIHLWDGVTFTSREEFREWFERLFSTSKDAWREIKSLEVRGDTVEVHVQLHFTLN

SEQ ID NO: 906 - protein, 165 aa, synthetic construct
GQKHTVDLTHHFHFRGNRVTEVRVHIRPTSKEAAEALVKILEKVRGEEYAKRLRERLEKNFDELEDDVEWPEEEGPGISEEQIRQFLRRFYEALDSGDADTAASLFHPGVTIHLWDGVTFTSREEFREWFERLFSTSKDAWREIKSLEVRGDTVEVHVQLHFTLN

SEQ ID NO: 907 - protein, 165 aa, synthetic construct
GQKHTVDLTHHFHFRGNRVTEVRVHIRPRDAAAAQALIEMLRKTRGEEYAARLARRLEEDLEELPVDVEWPEMPGPGISEEQIRQFLRRFYEALDSGDADTAASLFHPGVTIHLWDGVTFTSREEFREWFERLFSTSKDAWREIKSLEVRGDTVEVHVQLHFTLN

SEQ ID NO: 908 - protein, 165 aa, synthetic construct
GQKHTVDLTHHFHFRGNRVTEVRVHIRPRGPAAAAAVVEILRKTRGEEATAALARRLAEGADALPVDVEWPEPEGPGISEEQIRQFLRRFYEALDSGDADTAASLFHPGVTIHLWDGVTFTSREEFREWFERLFSTSKDAWREIKSLEVRGDTVEVHVQLHFTLN

SEQ ID NO: 909 - protein, 165 aa, synthetic construct
GQKHTVDLTHHFHFRGNRVTEVRVHIRPTSPAAAAAVIAMVERARGGEVAAALGRRLAEGAEELPVDVEWPEMPGPGISEEQIRQFLRRFYEALDSGDADTAASLFHPGVTIHLWDGVTFTSREEFREWFERLFSTSKDAWREIKSLEVRGDTVEVHVQLHFTLN

SEQ ID NO: 910 - protein, 165 aa, synthetic construct
GQKHTVDLTHHFHFRGNRVTEVRVHIRPRSEEAAEAVVKMTEAAFGEEKTEALRRRLEEGAEELPWDYEWPEMPGPGISEEQIRQFLRRFYEALDSGDADTAASLFHPGVTIHLWDGVTFTSREEFREWFERLFSTSKDAWREIKSLEVRGDTVEVHVQLHFTLN

SEQ ID NO: 911 - protein, 165 aa, synthetic construct
GQKHTVDLTHHFHFRGNRVTEVRVHIRPRDAAAAAAVVEIVRKAFGEERAAALARRLEEEADALPVDVEWPEQPGPGISEEQIRQFLRRFYEALDSGDADTAASLFHPGVTIHLWDGVTFTSREEFREWFERLFSTSKDAWREIKSLEVRGDTVEVHVQLHFTLN

SEQ ID NO: 912 - protein, 165 aa, synthetic construct
GQKHTVDLTHHFHFRGNRVTEVRVHILPTSEEARKALIKMVEKARGEEVAERLARRLEENAEELPDDVEWPEMPGPGISEEQIRQFLRRFYEALDSGDADTAASLFHPGVTIHLWDGVTFTSREEFREWFERLFSTSKDAWREIKSLEVRGDTVEVHVQLHFTLN

SEQ ID NO: 913 - protein, 165 aa, synthetic construct
GQKHTVDLTHHFHFRGNRVTEVRVHIRPTSAEAAAAVIKMVEATRGGEYAARLGARLEENADALPVDVEVPEMPGPGISEEQIRQFLRRFYEALDSGDADTAASLFHPGVTIHLWDGVTFTSREEFREWFERLFSTSKDAWREIKSLEVRGDTVEVHVQLHFTLN

SEQ ID NO: 914 - protein, 165 aa, synthetic construct
GQKHTVDLTHHFHFRGNRVTEVRVHIRPRDAAAAAAVVQIMEKARGEGATAALAARLEEDADALPVDVEWPEMPGPGISEEQIRQFLRRFYEALDSGDADTAASLFHPGVTIHLWDGVTFTSREEFREWFERLFSTSKDAWREIKSLEVRGDTVEVHVQLHFTLN

SEQ ID NO: 915 - protein, 165 aa, synthetic construct
GQKHTVDLTHHFHFRGNRVTEVRVHIKPTDEAAAKALIEITKKVRGEGYTERLAERLEKNLDELPVDVEWPEMPGPGISEEQIRQFLRRFYEALDSGDADTAASLFHPGVTIHLWDGVTFTSREEFREWFERLFSTSKDAWREIKSLEVRGDTVEVHVQLHFTLN

SEQ ID NO: 916 - protein, 165 aa, synthetic construct
GQKHTVDLTHHFHFRGNRVTEVRVHIRPRDEAAAEALIKISEKTFGEERTARLARRLREGLGELPDDVEWPTMEGPGISEEQIRQFLRRFYEALDSGDADTAASLFHPGVTIHLWDGVTFTSREEFREWFERLFSTSKDAWREIKSLEVRGDTVEVHVQLHFTLN

SEQ ID NO: 917 - protein, 166 aa, synthetic construct
GQKHTVDLTHHFHFRGNRVTEVRVHINPTTGEEEREFVRELLRELLGLLLELLLLLLLEELLLLLEELEELLEGPGGPMSEEQIRQFLRRFYEALDSGDADTAASLFHPGVTIHLWDGVTFTSREEFREWFERLFSTSKDAWREIKSLEVRGDTVEVHVQLHFTLN

SEQ ID NO: 918 - protein, 166 aa, synthetic construct
GQKHTVDLTHHFHFRGNRVTEVRVHIHPRDEAAEEAVVRLVEVLDGERAEAVRERLRAERGAAAPPLEFARAGPGGPPITEEQIRQFLRRFYEALDSGDADTAASLFHPGVTIHLWDGVTFTSREEFREWFERLFSTSKDAWREIKSLEVRGDTVEVHVQLHFTLN

SEQ ID NO: 919 - protein, 166 aa, synthetic construct
GQKHTVDLTHHFHFRGNRVTEVRVHIHPTDEAARQAVVELVRVLNGERAEAVAARLEREKGAALPPLEFDRAGPGGPPITEEQIRQFLRRFYEALDSGDADTAASLFHPGVTIHLWDGVTFTSREEFREWFERLFSTSKDAWREIKSLEVRGDTVEVHVQLHFTLN

SEQ ID NO: 920 - protein, 166 aa, synthetic construct
GQKHTVDLTHHFHFRGNRVTEVRVHIRPTDAAARAAVVALVEKLDGERAAAVAERLETEGGAAELPLEFDRDGPGGPPISEEQIRQFLRRFYEALDSGDADTAASLFHPGVTIHLWDGVTFTSREEFREWFERLFSTSKDAWREIKSLEVRGDTVEVHVQLHFTLN

SEQ ID NO: 921 - protein, 166 aa, synthetic construct
GQKHTVDLTHHFHFRGNRVTEVRVHIHPTDAAAEAAVVRLVEVLDGERAEEVRRRLEEEKGKAEPEPEFARDGPGGPPISEEQIRQFLRRFYEALDSGDADTAASLFHPGVTIHLWDGVTFTSREEFREWFERLFSTSKDAWREIKSLEVRGDTVEVHVQLHFTLN

SEQ ID NO: 922 - protein, 166 aa, synthetic construct
GQKHTVDLTHHFHFRGNRVTEVRVHIHPTDEASEEAVVRLVEVLDGERAEAVRERLRAEKGAAEPPLEFARAGPGGPPISEEQIRQFLRRFYEALDSGDADTAASLFHPGVTIHLWDGVTFTSREEFREWFERLFSTSKDAWREIKSLEVRGDTVEVHVQLHFTLN

SEQ ID NO: 923 - protein, 166 aa, synthetic construct
GQKHTVDLTHHFHFRGNRVTEVRVHIRPRDAAARAAVVGLVRTLDGARADAVAARLEATGGADEPPLAFDRAGPGGPPISEEQIRQFLRRFYEALDSGDADTAASLFHPGVTIHLWDGVTFTSREEFREWFERLFSTSKDAWREIKSLEVRGDTVEVHVQLHFTLN

SEQ ID NO: 924 - protein, 166 aa, synthetic construct
GQKHTVDLTHHFHFRGNRVTEVRVHIHPRDEAAREAVVRLVETLDGERAEEVRRRLEEEGGEAEPPLEFARAGPGGPPITEEQIRQFLRRFYEALDSGDADTAASLFHPGVTIHLWDGVTFTSREEFREWFERLFSTSKDAWREIKSLEVRGDTVEVHVQLHFTLN

SEQ ID NO: 925 - protein, 166 aa, synthetic construct
GQKHTVDLTHHFHFRGNRVTEVRVHIHPTGPEAREAVVKMVEALSGERAEAVRRRLEEKGGAEEEEPAFARTGPGGPPISEEQIRQFLRRFYEALDSGDADTAASLFHPGVTIHLWDGVTFTSREEFREWFERLFSTSKDAWREIKSLEVRGDTVEVHVQLHFTLN

SEQ ID NO: 926 - protein, 166 aa, synthetic construct
GQKHTVDLTHHFHFRGNRVTEVRVHIHPTDEAAEEAVVRLVEVLNGERAEAVRERLRRERGRAEPPLEFDRDGPGGPPITEEQIRQFLRRFYEALDSGDADTAASLFHPGVTIHLWDGVTFTSREEFREWFERLFSTSKDAWREIKSLEVRGDTVEVHVQLHFTLN

SEQ ID NO: 927 - protein, 166 aa, synthetic construct
GQKHTVDLTHHFHFRGNRVTEVRVHIHPTDEAAKEAVIRLVEVLDGERTEEVRRRLEEEGGKAEPEEEFARAGPGGPPISEEQIRQFLRRFYEALDSGDADTAASLFHPGVTIHLWDGVTFTSREEFREWFERLFSTSKDAWREIKSLEVRGDTVEVHVQLHFTLN

SEQ ID NO: 928 - protein, 166 aa, synthetic construct
GQKHTVDLTHHFHFRGNRVTEVRVHIHPRDAAAEAAVVELVRALSGERAEAVAARLRAEGGAAEAPVEFERDGPGGPPITEEQIRQFLRRFYEALDSGDADTAASLFHPGVTIHLWDGVTFTSREEFREWFERLFSTSKDAWREIKSLEVRGDTVEVHVQLHFTLN

SEQ ID NO: 929 - protein, 166 aa, synthetic construct
GQKHTVDLTHHFHFRGNRVTEVRVHIRPTGPAAEEAVVELVRVADGERAEAVRERLVTEKGKAELPLEFARTGPGGPPISEEQIRQFLRRFYEALDSGDADTAASLFHPGVTIHLWDGVTFTSREEFREWFERLFSTSKDAWREIKSLEVRGDTVEVHVQLHFTLN

SEQ ID NO: 930 - protein, 166 aa, synthetic construct
GQKHTVDLTHHFHFRGNRVTEVRVHIRPTDEAAEEAVVRLVEVLDGERAEAVRRRLREEGGRAAPPPAFARAGPGGPPITEEQIRQFLRRFYEALDSGDADTAASLFHPGVTIHLWDGVTFTSREEFREWFERLFSTSKDAWREIKSLEVRGDTVEVHVQLHFTLN

SEQ ID NO: 931 - protein, 166 aa, synthetic construct
GQKHTVDLTHHFHFRGNRVTEVRVHIHPTGPAARAAVVALVAKLSGERTEAVRARLEAEQGQAEEPPEFARAGPGGPPISEEQIRQFLRRFYEALDSGDADTAASLFHPGVTIHLWDGVTFTSREEFREWFERLFSTSKDAWREIKSLEVRGDTVEVHVQLHFTLN

SEQ ID NO: 932 - protein, 166 aa, synthetic construct
GQKHTVDLTHHFHFRGNRVTEVRVHIHPTDEAARAAVVRLVEVLDGERAEAVRARLEAEGGAAELPLAFARAGPGGPPISEEQIRQFLRRFYEALDSGDADTAASLFHPGVTIHLWDGVTFTSREEFREWFERLFSTSKDAWREIKSLEVRGDTVEVHVQLHFTLN

SEQ ID NO: 933 - protein, 166 aa, synthetic construct
GQKHTVDLTHHFHFRGNRVTEVRVHIHPTDEAARDAVVALVEKLDGERAAAVRERLETEGGRAEPPPEFDREGPGGPPISEEQIRQFLRRFYEALDSGDADTAASLFHPGVTIHLWDGVTFTSREEFREWFERLFSTSKDAWREIKSLEVRGDTVEVHVQLHFTLN

SEQ ID NO: 934 - protein, 166 aa, synthetic construct
GQKHTVDLTHHFHFRGNRVTEVRVHIHPTGPAAEAAVVRMVEVLDGERAAAVRARLEAERGRAEPPLAFERDGPGGPPISEEQIRQFLRRFYEALDSGDADTAASLFHPGVTIHLWDGVTFTSREEFREWFERLFSTSKDAWREIKSLEVRGDTVEVHVQLHFTLN

SEQ ID NO: 935 - protein, 166 aa, synthetic construct
GQKHTVDLTHHFHFRGNRVTEVRVHIRPTGPAAEEAVVQLVEVLSGERAEAVRARLRAEKGAAAPPLEFARDGPGGPPITEEQIRQFLRRFYEALDSGDADTAASLFHPGVTIHLWDGVTFTSREEFREWFERLFSTSKDAWREIKSLEVRGDTVEVHVQLHFTLN

SEQ ID NO: 936 - protein, 166 aa, synthetic construct
GQKHTVDLTHHFHFRGNRVTEVRVHIHPTDEAAREAVVELVRVLDGERAEEVRRRLEEEKGEAEPEPEFERDGPGGPPITEEQIRQFLRRFYEALDSGDADTAASLFHPGVTIHLWDGVTFTSREEFREWFERLFSTSKDAWREIKSLEVRGDTVEVHVQLHFTLN

SEQ ID NO: 937 - protein, 166 aa, synthetic construct
GQKHTVDLTHHFHFRGNRVTEVRVHIRPTDEAAEEAVVRLVEVLDGERAEAVRRRLREEKGEAEPPLEFARAGPGGPPITEEQIRQFLRRFYEALDSGDADTAASLFHPGVTIHLWDGVTFTSREEFREWFERLFSTSKDAWREIKSLEVRGDTVEVHVQLHFTLN

SEQ ID NO: 938 - protein, 167 aa, synthetic construct
GQKHTVDLTHHFHFRGNRVTEVRVHINPTTGEEEREFVRELLRELGGELLLLLLLLLLLLLLLLLLLLLLLLERGGGGPMSEEQIRQFLRRFYEALDSGDADTAASLFHPGVTIHLWDGVTFTSREEFREWFERLFSTSKDAWREIKSLEVRGDTVEVHVQLHFTLN

SEQ ID NO: 939 - protein, 167 aa, synthetic construct
GQKHTVDLTHHFHFRGNRVTEVRVHIRPTDAASLAAVAELARRAGGGRVAEVLAQLVANAGGAAPLPWDLTVPGGPGPGISEEQIRQFLRRFYEALDSGDADTAASLFHPGVTIHLWDGVTFTSREEFREWFERLFSTSKDAWREIKSLEVRGDTVEVHVQLHFTLN

SEQ ID NO: 940 - protein, 167 aa, synthetic construct
GQKHTVDLTHHFHFRGNRVTEVRVHIRPTDEASLAAVAELARRAFGGVAEEVLAELVANAGGDLPLPWDLTVPGGPGPGISEEQIRQFLRRFYEALDSGDADTAASLFHPGVTIHLWDGVTFTSREEFREWFERLFSTSKDAWREIKSLEVRGDTVEVHVQLHFTLN

SEQ ID NO: 941 - protein, 167 aa, synthetic construct
GQKHTVDLTHHFHFRGNRVTEVRVHIRPTDEASLEAVRRLAEKAFGGTAREVLDALAANAGGEAPLPWDLTRPGGPGPGISEEQIRQFLRRFYEALDSGDADTAASLFHPGVTIHLWDGVTFTSREEFREWFERLFSTSKDAWREIKSLEVRGDTVEVHVQLHFTLN

SEQ ID NO: 942 - protein, 167 aa, synthetic construct
GQKHTVDLTHHFHFRGNRVTEVRVHIRPTDEAALAAVAELVRRAFGGVADAALAELVAAAGGEPALPWSLEYPGGPGPGISEEQIRQFLRRFYEALDSGDADTAASLFHPGVTIHLWDGVTFTSREEFREWFERLFSTSKDAWREIKSLEVRGDTVEVHVQLHFTLN

SEQ ID NO: 943 - protein, 167 aa, synthetic construct
GQKHTVDLTHHFHFRGNRVTEVRVHIRPTDQAALDAVRALAAKAGGGVLAEVLAELAAAFGGAAPLPWDLTWPGGPGPGISEEQIRQFLRRFYEALDSGDADTAASLFHPGVTIHLWDGVTFTSREEFREWFERLFSTSKDAWREIKSLEVRGDTVEVHVQLHFTLN

SEQ ID NO: 944 - protein, 167 aa, synthetic construct
GQKHTVDLTHHFHFRGNRVTEVRVHIRPTDEAALAAVRELAAKAFGGVAEKVLDELVANAGGDAPLPWSLERPGGPGPGISEEQIRQFLRRFYEALDSGDADTAASLFHPGVTIHLWDGVTFTSREEFREWFERLFSTSKDAWREIKSLEVRGDTVEVHVQLHFTLN

SEQ ID NO: 945 - protein, 167 aa, synthetic construct
GQKHTVDLTHHFHFRGNRVTEVRVHIRPTDEASLEAVAELAKRAFGGRVEEVLEELVANAGGAAPLPWDLSYPGGPGPGISEEQIRQFLRRFYEALDSGDADTAASLFHPGVTIHLWDGVTFTSREEFREWFERLFSTSKDAWREIKSLEVRGDTVEVHVQLHFTLN

SEQ ID NO: 946 - protein, 167 aa, synthetic construct
GQKHTVDLTHHFHFRGNRVTEVRVHITPTGPAALEAVRQLALKAGGGVLEEVLAALAAAAGGAAPLPWDLTRPGGPGPGISEEQIRQFLRRFYEALDSGDADTAASLFHPGVTIHLWDGVTFTSREEFREWFERLFSTSKDAWREIKSLEVRGDTVEVHVQLHFTLN

SEQ ID NO: 947 - protein, 167 aa, synthetic construct
GQKHTVDLTHHFHFRGNRVTEVRVHIRPTDEASLEAVRQLALKAGGGRVAEVLELLVANAGGEAPLPWSLEVPGGPGPGISEEQIRQFLRRFYEALDSGDADTAASLFHPGVTIHLWDGVTFTSREEFREWFERLFSTSKDAWREIKSLEVRGDTVEVHVQLHFTLN

SEQ ID NO: 948 - protein, 167 aa, synthetic construct
GQKHTVDLTHHFHFRGNRVTEVRVHIRPTDEAALAAVAELARRLGGERVAEVLELLRAHAGGDAPLPWDDTVPGGPGPGISEEQIRQFLRRFYEALDSGDADTAASLFHPGVTIHLWDGVTFTSREEFREWFERLFSTSKDAWREIKSLEVRGDTVEVHVQLHFTLN

SEQ ID NO: 949 - protein, 167 aa, synthetic construct
GQKHTVDLTHHFHFRGNRVTEVRVHIRPTGPEALEAVVELARRAGGGVLEEVLEELAANAGGEPALPWDLTYPGGPGPGISEEQIRQFLRRFYEALDSGDADTAASLFHPGVTIHLWDGVTFTSREEFREWFERLFSTSKDAWREIKSLEVRGDTVEVHVQLHFTLN

SEQ ID NO: 950 - protein, 167 aa, synthetic construct
GQKHTVDLTHHFHFRGNRVTEVRVHIRPTGPASLEAVRQLALKAFGGVVEEVLEQLVANQGPDAPLPWSLETPGGPGPGISEEQIRQFLRRFYEALDSGDADTAASLFHPGVTIHLWDGVTFTSREEFREWFERLFSTSKDAWREIKSLEVRGDTVEVHVQLHFTLN

SEQ ID NO: 951 - protein, 167 aa, synthetic construct
GQKHTVDLTHHFHFRGNRVTEVRVHIRPTDAAALEAVRALAEKAFGGVAREVLDALAANAGGDLPLPWDLTVPGGPGPGISEEQIRQFLRRFYEALDSGDADTAASLFHPGVTIHLWDGVTFTSREEFREWFERLFSTSKDAWREIKSLEVRGDTVEVHVQLHFTLN

SEQ ID NO: 952 - protein, 167 aa, synthetic construct
GQKHTVDLTHHFHFRGNRVTEVRVHIRPTDEASLKAVAELARKAFGGTVEEVLERLVASAGGEAPLPWDLTYPGGPGPGISEEQIRQFLRRFYEALDSGDADTAASLFHPGVTIHLWDGVTFTSREEFREWFERLFSTSKDAWREIKSLEVRGDTVEVHVQLHFTLN

SEQ ID NO: 953 - protein, 167 aa, synthetic construct
GQKHTVDLTHHFHFRGNRVTEVRVHIRPRDEAALEAVRELVEKLFGGRAREVLDLLAANAGADLPLPWDLSYPGGPGPGISEEQIRQFLRRFYEALDSGDADTAASLFHPGVTIHLWDGVTFTSREEFREWFERLFSTSKDAWREIKSLEVRGDTVEVHVQLHFTLN

SEQ ID NO: 954 - protein, 167 aa, synthetic construct
GQKHTVDLTHHFHFRGNRVTEVRVHIRPTDEASLAAVRQLVEKLFGERAAAVLDELAANAGGEAPLPWDLTVPGGPGPGISEEQIRQFLRRFYEALDSGDADTAASLFHPGVTIHLWDGVTFTSREEFREWFERLFSTSKDAWREIKSLEVRGDTVEVHVQLHFTLN

SEQ ID NO: 955 - protein, 167 aa, synthetic construct
GQKHTVDLTHHFHFRGNRVTEVRVHIRPTDAASLEAVRQLALKAFGGVAEEVLELLAENAGGEAPLPWSDTVPGGPGPGISEEQIRQFLRRFYEALDSGDADTAASLFHPGVTIHLWDGVTFTSREEFREWFERLFSTSKDAWREIKSLEVRGDTVEVHVQLHFTLN

SEQ ID NO: 956 - protein, 167 aa, synthetic construct
GQKHTVDLTHHFHFRGNRVTEVRVHIRPTDEASLKAVAELVKKAFGGVAEEVLALLVANAGGDAPLPWDLTWPGGPGPGISEEQIRQFLRRFYEALDSGDADTAASLFHPGVTIHLWDGVTFTSREEFREWFERLFSTSKDAWREIKSLEVRGDTVEVHVQLHFTLN

SEQ ID NO: 957 - protein, 167 aa, synthetic construct
GQKHTVDLTHHFHFRGNRVTEVRVHIKPTDEASLEAVRELALKAGGGVVEEVLEELVANRGGEPSLPWSLTRPGGPGPGITEEQIRQFLRRFYEALDSGDADTAASLFHPGVTIHLWDGVTFTSREEFREWFERLFSTSKDAWREIKSLEVRGDTVEVHVQLHFTLN

SEQ ID NO: 958 - protein, 167 aa, synthetic construct
GQKHTVDLTHHFHFRGNRVTEVRVHIRPTDAAALAAVRALAERAFGGRAAAVLDELAAAAGGAPALPWSLDYPGGPGPGISEEQIRQFLRRFYEALDSGDADTAASLFHPGVTIHLWDGVTFTSREEFREWFERLFSTSKDAWREIKSLEVRGDTVEVHVQLHFTLN

SEQ ID NO: 959 - protein, 127 aa, synthetic construct
GQKHTVDLTHHFHFRGNRVTEVRVHINPTVDGPLVVPPPMSEEQIRQFLRRFYEALDSGDADTAASLFHPGVTIHLWDGVTFTSREEFREWFERLFSTSKDAWREIKSLEVRGDTVEVHVQLHFTLN

SEQ ID NO: 960 - protein, 127 aa, synthetic construct
GQKHTVDLTHHFHFRGNRVTEVRVHIEPLSGPEAEPEGPGPEEQIRQFLRRFYEALDSGDADTAASLFHPGVTIHLWDGVTFTSREEFREWFERLFSTSKDAWREIKSLEVRGDTVEVHVQLHFTLN

SEQ ID NO: 961 - protein, 127 aa, synthetic construct
GQKHTVDLTHHFHFRGNRVTEVRVHIVPASGPEAEPEGPGPEEQIRQFLRRFYEALDSGDADTAASLFHPGVTIHLWDGVTFTSREEFREWFERLFSTSKDAWREIKSLEVRGDTVEVHVQLHFTLN

SEQ ID NO: 962 - protein, 127 aa, synthetic construct
GQKHTVDLTHHFHFRGNRVTEVRVHIVPASGPEARPEGPGPEEQIRQFLRRFYEALDSGDADTAASLFHPGVTIHLWDGVTFTSREEFREWFERLFSTSKDAWREIKSLEVRGDTVEVHVQLHFTLN

SEQ ID NO: 963 - protein, 127 aa, synthetic construct
GQKHTVDLTHHFHFRGNRVTEVRVHITPASGPTATPEGPGPEEQIRQFLRRFYEALDSGDADTAASLFHPGVTIHLWDGVTFTSREEFREWFERLFSTSKDAWREIKSLEVRGDTVEVHVQLHFTLN

SEQ ID NO: 964 - protein, 127 aa, synthetic construct
GQKHTVDLTHHFHFRGNRVTEVRVHITPASGPRAEPEGPGPEEQIRQFLRRFYEALDSGDADTAASLFHPGVTIHLWDGVTFTSREEFREWFERLFSTSKDAWREIKSLEVRGDTVEVHVQLHFTLN

SEQ ID NO: 965 - protein, 127 aa, synthetic construct
GQKHTVDLTHHFHFRGNRVTEVRVHIEPASGPEAEPEGPGPEEQIRQFLRRFYEALDSGDADTAASLFHPGVTIHLWDGVTFTSREEFREWFERLFSTSKDAWREIKSLEVRGDTVEVHVQLHFTLN

SEQ ID NO: 966 - protein, 127 aa, synthetic construct
GQKHTVDLTHHFHFRGNRVTEVRVHIVPAEGPEAEPEGPGPEEQIRQFLRRFYEALDSGDADTAASLFHPGVTIHLWDGVTFTSREEFREWFERLFSTSKDAWREIKSLEVRGDTVEVHVQLHFTLN

SEQ ID NO: 967 - protein, 127 aa, synthetic construct
GQKHTVDLTHHFHFRGNRVTEVRVHIVPAAGPEAEPEGPGPEEQIRQFLRRFYEALDSGDADTAASLFHPGVTIHLWDGVTFTSREEFREWFERLFSTSKDAWREIKSLEVRGDTVEVHVQLHFTLN

SEQ ID NO: 968 - protein, 127 aa, synthetic construct
GQKHTVDLTHHFHFRGNRVTEVRVHITPASGPTARPEGPGPEEQIRQFLRRFYEALDSGDADTAASLFHPGVTIHLWDGVTFTSREEFREWFERLFSTSKDAWREIKSLEVRGDTVEVHVQLHFTLN

SEQ ID NO: 969 - protein, 127 aa, synthetic construct
GQKHTVDLTHHFHFRGNRVTEVRVHITPASGPEAEPEGPGPEEQIRQFLRRFYEALDSGDADTAASLFHPGVTIHLWDGVTFTSREEFREWFERLFSTSKDAWREIKSLEVRGDTVEVHVQLHFTLN

SEQ ID NO: 970 - protein, 127 aa, synthetic construct
GQKHTVDLTHHFHFRGNRVTEVRVHIVPAAGPEAAPEGPGPEEQIRQFLRRFYEALDSGDADTAASLFHPGVTIHLWDGVTFTSREEFREWFERLFSTSKDAWREIKSLEVRGDTVEVHVQLHFTLN

SEQ ID NO: 971 - protein, 127 aa, synthetic construct
GQKHTVDLTHHFHFRGNRVTEVRVHIVPAAGPEARPEGPGPEEQIRQFLRRFYEALDSGDADTAASLFHPGVTIHLWDGVTFTSREEFREWFERLFSTSKDAWREIKSLEVRGDTVEVHVQLHFTLN

SEQ ID NO: 972 - protein, 127 aa, synthetic construct
GQKHTVDLTHHFHFRGNRVTEVRVHIVPAEGPEAAPEGPGPEEQIRQFLRRFYEALDSGDADTAASLFHPGVTIHLWDGVTFTSREEFREWFERLFSTSKDAWREIKSLEVRGDTVEVHVQLHFTLN

SEQ ID NO: 973 - protein, 128 aa, synthetic construct
GQKHTVDLTHHFHFRGNRVTEVRVHINPTVGGEPVVVPPPMSEEQIRQFLRRFYEALDSGDADTAASLFHPGVTIHLWDGVTFTSREEFREWFERLFSTSKDAWREIKSLEVRGDTVEVHVQLHFTLN

SEQ ID NO: 974 - protein, 128 aa, synthetic construct
GQKHTVDLTHHFHFRGNRVTEVRVHIYPSGPRPSYEGEGSLSEEQIRQFLRRFYEALDSGDADTAASLFHPGVTIHLWDGVTFTSREEFREWFERLFSTSKDAWREIKSLEVRGDTVEVHVQLHFTLN

SEQ ID NO: 975 - protein, 128 aa, synthetic construct
GQKHTVDLTHHFHFRGNRVTEVRVHIHPSGERPSFEGEGELSEEQIRQFLRRFYEALDSGDADTAASLFHPGVTIHLWDGVTFTSREEFREWFERLFSTSKDAWREIKSLEVRGDTVEVHVQLHFTLN

SEQ ID NO: 976 - protein, 128 aa, synthetic construct
GQKHTVDLTHHFHFRGNRVTEVRVHIHPSGERPSFEGEGSLSEEQIRQFLRRFYEALDSGDADTAASLFHPGVTIHLWDGVTFTSREEFREWFERLFSTSKDAWREIKSLEVRGDTVEVHVQLHFTLN

SEQ ID NO: 977 - protein, 128 aa, synthetic construct
GQKHTVDLTHHFHFRGNRVTEVRVHIHPAGERPRYEGEGSLSEEQIRQFLRRFYEALDSGDADTAASLFHPGVTIHLWDGVTFTSREEFREWFERLFSTSKDAWREIKSLEVRGDTVEVHVQLHFTLN

SEQ ID NO: 978 - protein, 128 aa, synthetic construct
GQKHTVDLTHHFHFRGNRVTEVRVHIHPSGPRPSFEGEGSLSEEQIRQFLRRFYEALDSGDADTAASLFHPGVTIHLWDGVTFTSREEFREWFERLFSTSKDAWREIKSLEVRGDTVEVHVQLHFTLN

SEQ ID NO: 979 - protein, 128 aa, synthetic construct
GQKHTVDLTHHFHFRGNRVTEVRVHIYPSGPRPRRRGRGSLSEEQIRQFLRRFYEALDSGDADTAASLFHPGVTIHLWDGVTFTSREEFREWFERLFSTSKDAWREIKSLEVRGDTVEVHVQLHFTLN

SEQ ID NO: 980 - protein, 128 aa, synthetic construct
GQKHTVDLTHHFHFRGNRVTEVRVHIHPSAERPSLEGEGSLSEEQIRQFLRRFYEALDSGDADTAASLFHPGVTIHLWDGVTFTSREEFREWFERLFSTSKDAWREIKSLEVRGDTVEVHVQLHFTLN

SEQ ID NO: 981 - protein, 128 aa, synthetic construct
GQKHTVDLTHHFHFRGNRVTEVRVHIHPSGPRPSREGEGSLSEEQIRQFLRRFYEALDSGDADTAASLFHPGVTIHLWDGVTFTSREEFREWFERLFSTSKDAWREIKSLEVRGDTVEVHVQLHFTLN

SEQ ID NO: 982 - protein, 128 aa, synthetic construct
GQKHTVDLTHHFHFRGNRVTEVRVHIHPSGERPRFEGEGSLSEEQIRQFLRRFYEALDSGDADTAASLFHPGVTIHLWDGVTFTSREEFREWFERLFSTSKDAWREIKSLEVRGDTVEVHVQLHFTLN

SEQ ID NO: 983 - protein, 128 aa, synthetic construct
GQKHTVDLTHHFHFRGNRVTEVRVHIYPSGERPRFEGEGSLSEEQIRQFLRRFYEALDSGDADTAASLFHPGVTIHLWDGVTFTSREEFREWFERLFSTSKDAWREIKSLEVRGDTVEVHVQLHFTLN

SEQ ID NO: 984 - protein, 128 aa, synthetic construct
GQKHTVDLTHHFHFRGNRVTEVRVHIHPAGERPSYEGEGSLSEEQIRQFLRRFYEALDSGDADTAASLFHPGVTIHLWDGVTFTSREEFREWFERLFSTSKDAWREIKSLEVRGDTVEVHVQLHFTLN

SEQ ID NO: 985 - protein, 128 aa, synthetic construct
GQKHTVDLTHHFHFRGNRVTEVRVHIHPAGERPRFEGEGSLSEEQIRQFLRRFYEALDSGDADTAASLFHPGVTIHLWDGVTFTSREEFREWFERLFSTSKDAWREIKSLEVRGDTVEVHVQLHFTLN

SEQ ID NO: 986 - protein, 128 aa, synthetic construct
GQKHTVDLTHHFHFRGNRVTEVRVHIYPAGERPRREGEGSLSEEQIRQFLRRFYEALDSGDADTAASLFHPGVTIHLWDGVTFTSREEFREWFERLFSTSKDAWREIKSLEVRGDTVEVHVQLHFTLN

SEQ ID NO: 987 - protein, 128 aa, synthetic construct
GQKHTVDLTHHFHFRGNRVTEVRVHIHPAGERPRREGTGSLSEEQIRQFLRRFYEALDSGDADTAASLFHPGVTIHLWDGVTFTSREEFREWFERLFSTSKDAWREIKSLEVRGDTVEVHVQLHFTLN

SEQ ID NO: 988 - protein, 128 aa, synthetic construct
GQKHTVDLTHHFHFRGNRVTEVRVHIHPSGERPRYEGEGSLSEEQIRQFLRRFYEALDSGDADTAASLFHPGVTIHLWDGVTFTSREEFREWFERLFSTSKDAWREIKSLEVRGDTVEVHVQLHFTLN

SEQ ID NO: 989 - protein, 128 aa, synthetic construct
GQKHTVDLTHHFHFRGNRVTEVRVHIYPASERPSFEGSGSLSEEQIRQFLRRFYEALDSGDADTAASLFHPGVTIHLWDGVTFTSREEFREWFERLFSTSKDAWREIKSLEVRGDTVEVHVQLHFTLN

SEQ ID NO: 990 - protein, 129 aa, synthetic construct
GQKHTVDLTHHFHFRGNRVTEVRVHINPTVGEGPLLVVPPGMSEEQIRQFLRRFYEALDSGDADTAASLFHPGVTIHLWDGVTFTSREEFREWFERLFSTSKDAWREIKSLEVRGDTVEVHVQLHFTLN

SEQ ID NO: 991 - protein, 129 aa, synthetic construct
GQKHTVDLTHHFHFRGNRVTEVRVHIYPSGEGEREALPEGDMSEEQIRQFLRRFYEALDSGDADTAASLFHPGVTIHLWDGVTFTSREEFREWFERLFSTSKDAWREIKSLEVRGDTVEVHVQLHFTLN

SEQ ID NO: 992 - protein, 129 aa, synthetic construct
GQKHTVDLTHHFHFRGNRVTEVRVHIYPSGEGRREAAPEGSMSEEQIRQFLRRFYEALDSGDADTAASLFHPGVTIHLWDGVTFTSREEFREWFERLFSTSKDAWREIKSLEVRGDTVEVHVQLHFTLN

SEQ ID NO: 993 - protein, 129 aa, synthetic construct
GQKHTVDLTHHFHFRGNRVTEVRVHIYPSEEGEREEAPEGDMSEEQIRQFLRRFYEALDSGDADTAASLFHPGVTIHLWDGVTFTSREEFREWFERLFSTSKDAWREIKSLEVRGDTVEVHVQLHFTLN

SEQ ID NO: 994 - protein, 129 aa, synthetic construct
GQKHTVDLTHHFHFRGNRVTEVRVHIYPSDEGERERRPEGSMSEEQIRQFLRRFYEALDSGDADTAASLFHPGVTIHLWDGVTFTSREEFREWFERLFSTSKDAWREIKSLEVRGDTVEVHVQLHFTLN

SEQ ID NO: 995 - protein, 129 aa, synthetic construct
GQKHTVDLTHHFHFRGNRVTEVRVHIFPSDEGERERAPEGDMSEEQIRQFLRRFYEALDSGDADTAASLFHPGVTIHLWDGVTFTSREEFREWFERLFSTSKDAWREIKSLEVRGDTVEVHVQLHFTLN

SEQ ID NO: 996 - protein, 129 aa, synthetic construct
GQKHTVDLTHHFHFRGNRVTEVRVHIYPSDEGERSRAPSGSMSEEQIRQFLRRFYEALDSGDADTAASLFHPGVTIHLWDGVTFTSREEFREWFERLFSTSKDAWREIKSLEVRGDTVEVHVQLHFTLN

SEQ ID NO: 997 - protein, 129 aa, synthetic construct
GQKHTVDLTHHFHFRGNRVTEVRVHIYPADEGERGEAPEGEMSEEQIRQFLRRFYEALDSGDADTAASLFHPGVTIHLWDGVTFTSREEFREWFERLFSTSKDAWREIKSLEVRGDTVEVHVQLHFTLN

SEQ ID NO: 998 - protein, 129 aa, synthetic construct
GQKHTVDLTHHFHFRGNRVTEVRVHIFPSGEGERARAPEGSMSEEQIRQFLRRFYEALDSGDADTAASLFHPGVTIHLWDGVTFTSREEFREWFERLFSTSKDAWREIKSLEVRGDTVEVHVQLHFTLN

SEQ ID NO: 999 - protein, 129 aa, synthetic construct
GQKHTVDLTHHFHFRGNRVTEVRVHIFPSGEGERERAPEGDMSEEQIRQFLRRFYEALDSGDADTAASLFHPGVTIHLWDGVTFTSREEFREWFERLFSTSKDAWREIKSLEVRGDTVEVHVQLHFTLN

SEQ ID NO: 1000 - protein, 129 aa, synthetic construct
GQKHTVDLTHHFHFRGNRVTEVRVHIYPSEEGERELAPEGSMSEEQIRQFLRRFYEALDSGDADTAASLFHPGVTIHLWDGVTFTSREEFREWFERLFSTSKDAWREIKSLEVRGDTVEVHVQLHFTLN

SEQ ID NO: 1001 - protein, 129 aa, synthetic construct
GQKHTVDLTHHFHFRGNRVTEVRVHIYPAGEGERRRAPEGDMPEEQIRQFLRRFYEALDSGDADTAASLFHPGVTIHLWDGVTFTSREEFREWFERLFSTSKDAWREIKSLEVRGDTVEVHVQLHFTLN

SEQ ID NO: 1002 - protein, 129 aa, synthetic construct
GQKHTVDLTHHFHFRGNRVTEVRVHIFPSEEGEREAAPEGDMSEEQIRQFLRRFYEALDSGDADTAASLFHPGVTIHLWDGVTFTSREEFREWFERLFSTSKDAWREIKSLEVRGDTVEVHVQLHFTLN

SEQ ID NO: 1003 - protein, 129 aa, synthetic construct
GQKHTVDLTHHFHFRGNRVTEVRVHIYPSDEGEREELPEGHMSEEQIRQFLRRFYEALDSGDADTAASLFHPGVTIHLWDGVTFTSREEFREWFERLFSTSKDAWREIKSLEVRGDTVEVHVQLHFTLN

SEQ ID NO: 1004 - protein, 129 aa, synthetic construct
GQKHTVDLTHHFHFRGNRVTEVRVHIYPSDEGEREALPEGAMSEEQIRQFLRRFYEALDSGDADTAASLFHPGVTIHLWDGVTFTSREEFREWFERLFSTSKDAWREIKSLEVRGDTVEVHVQLHFTLN

SEQ ID NO: 1005 - protein, 129 aa, synthetic construct
GQKHTVDLTHHFHFRGNRVTEVRVHIYPSGEGERGEAPEGDMSEEQIRQFLRRFYEALDSGDADTAASLFHPGVTIHLWDGVTFTSREEFREWFERLFSTSKDAWREIKSLEVRGDTVEVHVQLHFTLN

SEQ ID NO: 1006 - protein, 129 aa, synthetic construct
GQKHTVDLTHHFHFRGNRVTEVRVHIYPAEEGERAEAPEGSMSEEQIRQFLRRFYEALDSGDADTAASLFHPGVTIHLWDGVTFTSREEFREWFERLFSTSKDAWREIKSLEVRGDTVEVHVQLHFTLN

SEQ ID NO: 1007 - protein, 129 aa, synthetic construct
GQKHTVDLTHHFHFRGNRVTEVRVHIYPSGEGERAAAPEGSMSEEQIRQFLRRFYEALDSGDADTAASLFHPGVTIHLWDGVTFTSREEFREWFERLFSTSKDAWREIKSLEVRGDTVEVHVQLHFTLN

SEQ ID NO: 1008 - protein, 129 aa, synthetic construct
GQKHTVDLTHHFHFRGNRVTEVRVHIYPSDGGERGRAPEGSMSEEQIRQFLRRFYEALDSGDADTAASLFHPGVTIHLWDGVTFTSREEFREWFERLFSTSKDAWREIKSLEVRGDTVEVHVQLHFTLN

SEQ ID NO: 1009 - protein, 129 aa, synthetic construct
GQKHTVDLTHHFHFRGNRVTEVRVHIFPAEEGEREEAPEGAMSEEQIRQFLRRFYEALDSGDADTAASLFHPGVTIHLWDGVTFTSREEFREWFERLFSTSKDAWREIKSLEVRGDTVEVHVQLHFTLN

SEQ ID NO: 1010 - protein, 130 aa, synthetic construct
GQKHTVDLTHHFHFRGNRVTEVRVHINPTVDGEPLEVLEGPPMSEEQIRQFLRRFYEALDSGDADTAASLFHPGVTIHLWDGVTFTSREEFREWFERLFSTSKDAWREIKSLEVRGDTVEVHVQLHFTLN

SEQ ID NO: 1011 - protein, 130 aa, synthetic construct
GQKHTVDLTHHFHFRGNRVTEVRVHIEEVDGPRRETSSAPGSIGEEQIRQFLRRFYEALDSGDADTAASLFHPGVTIHLWDGVTFTSREEFREWFERLFSTSKDAWREIKSLEVRGDTVEVHVQLHFTLN

SEQ ID NO: 1012 - protein, 130 aa, synthetic construct
GQKHTVDLTHHFHFRGNRVTEVRVHITEVDGERRETASAPGPIPEEQIRQFLRRFYEALDSGDADTAASLFHPGVTIHLWDGVTFTSREEFREWFERLFSTSKDAWREIKSLEVRGDTVEVHVQLHFTLN

SEQ ID NO: 1013 - protein, 130 aa, synthetic construct
GQKHTVDLTHHFHFRGNRVTEVRVHIREVDGPEVETASAPGSIPEEQIRQFLRRFYEALDSGDADTAASLFHPGVTIHLWDGVTFTSREEFREWFERLFSTSKDAWREIKSLEVRGDTVEVHVQLHFTLN

SEQ ID NO: 1014 - protein, 130 aa, synthetic construct
GQKHTVDLTHHFHFRGNRVTEVRVHIREVDGPPRRSASSSGSIPEEQIRQFLRRFYEALDSGDADTAASLFHPGVTIHLWDGVTFTSREEFREWFERLFSTSKDAWREIKSLEVRGDTVEVHVQLHFTLN

SEQ ID NO: 1015 - protein, 130 aa, synthetic construct
GQKHTVDLTHHFHFRGNRVTEVRVHIRPVDGPEAETAEAAGEIGEEQIRQFLRRFYEALDSGDADTAASLFHPGVTIHLWDGVTFTSREEFREWFERLFSTSKDAWREIKSLEVRGDTVEVHVQLHFTLN

SEQ ID NO: 1016 - protein, 130 aa, synthetic construct
GQKHTVDLTHHFHFRGNRVTEVRVHITPVPGAPSSSRSAAGEIGEEQIRQFLRRFYEALDSGDADTAASLFHPGVTIHLWDGVTFTSREEFREWFERLFSTSKDAWREIKSLEVRGDTVEVHVQLHFTLN

SEQ ID NO: 1017 - protein, 130 aa, synthetic construct
GQKHTVDLTHHFHFRGNRVTEVRVHIEEVDGPPSESSSGPGSIGEEQIRQFLRRFYEALDSGDADTAASLFHPGVTIHLWDGVTFTSREEFREWFERLFSTSKDAWREIKSLEVRGDTVEVHVQLHFTLN

SEQ ID NO: 1018 - protein, 130 aa, synthetic construct
GQKHTVDLTHHFHFRGNRVTEVRVHIRDVDGPEREEAEASGEIGEEQIRQFLRRFYEALDSGDADTAASLFHPGVTIHLWDGVTFTSREEFREWFERLFSTSKDAWREIKSLEVRGDTVEVHVQLHFTLN

SEQ ID NO: 1019 - protein, 130 aa, synthetic construct
GQKHTVDLTHHFHFRGNRVTEVRVHITPVDGPRSESASGPGSIGEEQIRQFLRRFYEALDSGDADTAASLFHPGVTIHLWDGVTFTSREEFREWFERLFSTSKDAWREIKSLEVRGDTVEVHVQLHFTLN

SEQ ID NO: 1020 - protein, 130 aa, synthetic construct
GQKHTVDLTHHFHFRGNRVTEVRVHIREVDGPEARTASSAGDIPEEQIRQFLRRFYEALDSGDADTAASLFHPGVTIHLWDGVTFTSREEFREWFERLFSTSKDAWREIKSLEVRGDTVEVHVQLHFTLN

SEQ ID NO: 1021 - protein, 130 aa, synthetic construct
GQKHTVDLTHHFHFRGNRVTEVRVHIEEVDGPRSESGSSAGEIGEEQIRQFLRRFYEALDSGDADTAASLFHPGVTIHLWDGVTFTSREEFREWFERLFSTSKDAWREIKSLEVRGDTVEVHVQLHFTLN

SEQ ID NO: 1022 - protein, 130 aa, synthetic construct
GQKHTVDLTHHFHFRGNRVTEVRVHITPVPGPPSESSSSSGSIGEEQIRQFLRRFYEALDSGDADTAASLFHPGVTIHLWDGVTFTSREEFREWFERLFSTSKDAWREIKSLEVRGDTVEVHVQLHFTLN

SEQ ID NO: 1023 - protein, 130 aa, synthetic construct
GQKHTVDLTHHFHFRGNRVTEVRVHIREVDGPEAETASAPGEIGEEQIRQFLRRFYEALDSGDADTAASLFHPGVTIHLWDGVTFTSREEFREWFERLFSTSKDAWREIKSLEVRGDTVEVHVQLHFTLN

SEQ ID NO: 1024 - protein, 130 aa, synthetic construct
GQKHTVDLTHHFHFRGNRVTEVRVHITEVDGPESETSSGPGSIPEEQIRQFLRRFYEALDSGDADTAASLFHPGVTIHLWDGVTFTSREEFREWFERLFSTSKDAWREIKSLEVRGDTVEVHVQLHFTLN

SEQ ID NO: 1025 - protein, 130 aa, synthetic construct
GQKHTVDLTHHFHFRGNRVTEVRVHITEVDGPEARTASAPGEIGEEQIRQFLRRFYEALDSGDADTAASLFHPGVTIHLWDGVTFTSREEFREWFERLFSTSKDAWREIKSLEVRGDTVEVHVQLHFTLN

SEQ ID NO: 1026 - protein, 130 aa, synthetic construct
GQKHTVDLTHHFHFRGNRVTEVRVHITEVDGPEAETAEAPGSIPEEQIRQFLRRFYEALDSGDADTAASLFHPGVTIHLWDGVTFTSREEFREWFERLFSTSKDAWREIKSLEVRGDTVEVHVQLHFTLN

SEQ ID NO: 1027 - protein, 130 aa, synthetic construct
GQKHTVDLTHHFHFRGNRVTEVRVHITPVDGPEAETGSAPGSIGEEQIRQFLRRFYEALDSGDADTAASLFHPGVTIHLWDGVTFTSREEFREWFERLFSTSKDAWREIKSLEVRGDTVEVHVQLHFTLN

SEQ ID NO: 1028 - protein, 130 aa, synthetic construct
GQKHTVDLTHHFHFRGNRVTEVRVHITPVDGPPRESASSSGTIGEEQIRQFLRRFYEALDSGDADTAASLFHPGVTIHLWDGVTFTSREEFREWFERLFSTSKDAWREIKSLEVRGDTVEVHVQLHFTLN

SEQ ID NO: 1029 - protein, 130 aa, synthetic construct
GQKHTVDLTHHFHFRGNRVTEVRVHITPVDGPPAETAEAPGEIGEEQIRQFLRRFYEALDSGDADTAASLFHPGVTIHLWDGVTFTSREEFREWFERLFSTSKDAWREIKSLEVRGDTVEVHVQLHFTLN

SEQ ID NO: 1030 - protein, 130 aa, synthetic construct
GQKHTVDLTHHFHFRGNRVTEVRVHIREVDGPERETSSAPGSIPEEQIRQFLRRFYEALDSGDADTAASLFHPGVTIHLWDGVTFTSREEFREWFERLFSTSKDAWREIKSLEVRGDTVEVHVQLHFTLN

SEQ ID NO: 1031 - protein, 131 aa, synthetic construct
GQKHTVDLTHHFHFRGNRVTEVRVHINPTVDELEPPRVELGGGMSEEQIRQFLRRFYEALDSGDADTAASLFHPGVTIHLWDGVTFTSREEFREWFERLFSTSKDAWREIKSLEVRGDTVEVHVQLHFTLN

SEQ ID NO: 1032 - protein, 131 aa, synthetic construct
GQKHTVDLTHHFHFRGNRVTEVRVHITPVESANPERREGGGGPPSEEQIRQFLRRFYEALDSGDADTAASLFHPGVTIHLWDGVTFTSREEFREWFERLFSTSKDAWREIKSLEVRGDTVEVHVQLHFTLN

SEQ ID NO: 1033 - protein, 131 aa, synthetic construct
GQKHTVDLTHHFHFRGNRVTEVRVHITPVDSADPERHESGGGPPSEEQIRQFLRRFYEALDSGDADTAASLFHPGVTIHLWDGVTFTSREEFREWFERLFSTSKDAWREIKSLEVRGDTVEVHVQLHFTLN

SEQ ID NO: 1034 - protein, 131 aa, synthetic construct
GQKHTVDLTHHFHFRGNRVTEVRVHITPVESANPGRREGGGGPPPEEQIRQFLRRFYEALDSGDADTAASLFHPGVTIHLWDGVTFTSREEFREWFERLFSTSKDAWREIKSLEVRGDTVEVHVQLHFTLN

SEQ ID NO: 1035 - protein, 131 aa, synthetic construct
GQKHTVDLTHHFHFRGNRVTEVRVHITPVESANPERHESGGGPPPEEQIRQFLRRFYEALDSGDADTAASLFHPGVTIHLWDGVTFTSREEFREWFERLFSTSKDAWREIKSLEVRGDTVEVHVQLHFTLN

SEQ ID NO: 1036 - protein, 131 aa, synthetic construct
GQKHTVDLTHHFHFRGNRVTEVRVHITPVESANPERHESGGGPPSEEQIRQFLRRFYEALDSGDADTAASLFHPGVTIHLWDGVTFTSREEFREWFERLFSTSKDAWREIKSLEVRGDTVEVHVQLHFTLN

SEQ ID NO: 1037 - protein, 131 aa, synthetic construct
GQKHTVDLTHHFHFRGNRVTEVRVHIRPVESASPGRREGGGGPPPEEQIRQFLRRFYEALDSGDADTAASLFHPGVTIHLWDGVTFTSREEFREWFERLFSTSKDAWREIKSLEVRGDTVEVHVQLHFTLN

SEQ ID NO: 1038 - protein, 131 aa, synthetic construct
GQKHTVDLTHHFHFRGNRVTEVRVHITPVESANPERREGGGGPPPEEQIRQFLRRFYEALDSGDADTAASLFHPGVTIHLWDGVTFTSREEFREWFERLFSTSKDAWREIKSLEVRGDTVEVHVQLHFTLN

SEQ ID NO: 1039 - protein, 131 aa, synthetic construct
GQKHTVDLTHHFHFRGNRVTEVRVHIRPVESADPGRREGGGGPPPEEQIRQFLRRFYEALDSGDADTAASLFHPGVTIHLWDGVTFTSREEFREWFERLFSTSKDAWREIKSLEVRGDTVEVHVQLHFTLN

SEQ ID NO: 1040 - protein, 131 aa, synthetic construct
GQKHTVDLTHHFHFRGNRVTEVRVHITPVESANPERRFSGGGPPSEEQIRQFLRRFYEALDSGDADTAASLFHPGVTIHLWDGVTFTSREEFREWFERLFSTSKDAWREIKSLEVRGDTVEVHVQLHFTLN

SEQ ID NO: 1041 - protein, 131 aa, synthetic construct
GQKHTVDLTHHFHFRGNRVTEVRVHITPVSSASPGRRESGGGPPSEEQIRQFLRRFYEALDSGDADTAASLFHPGVTIHLWDGVTFTSREEFREWFERLFSTSKDAWREIKSLEVRGDTVEVHVQLHFTLN

SEQ ID NO: 1042 - protein, 131 aa, synthetic construct
GQKHTVDLTHHFHFRGNRVTEVRVHITPVESADPERRESGGGPPPEEQIRQFLRRFYEALDSGDADTAASLFHPGVTIHLWDGVTFTSREEFREWFERLFSTSKDAWREIKSLEVRGDTVEVHVQLHFTLN

SEQ ID NO: 1043 - protein, 131 aa, synthetic construct
GQKHTVDLTHHFHFRGNRVTEVRVHITPVESADPGRHEGGGGPPSEEQIRQFLRRFYEALDSGDADTAASLFHPGVTIHLWDGVTFTSREEFREWFERLFSTSKDAWREIKSLEVRGDTVEVHVQLHFTLN

SEQ ID NO: 1044 - protein, 131 aa, synthetic construct
GQKHTVDLTHHFHFRGNRVTEVRVHITPVESANPGRHFSGGGPPPEEQIRQFLRRFYEALDSGDADTAASLFHPGVTIHLWDGVTFTSREEFREWFERLFSTSKDAWREIKSLEVRGDTVEVHVQLHFTLN

SEQ ID NO: 1045 - protein, 131 aa, synthetic construct
GQKHTVDLTHHFHFRGNRVTEVRVHITPVESANPDRREGGGGPPPEEQIRQFLRRFYEALDSGDADTAASLFHPGVTIHLWDGVTFTSREEFREWFERLFSTSKDAWREIKSLEVRGDTVEVHVQLHFTLN

SEQ ID NO: 1046 - protein, 131 aa, synthetic construct
GQKHTVDLTHHFHFRGNRVTEVRVHITPVESADPEFHESGGGPPPEEQIRQFLRRFYEALDSGDADTAASLFHPGVTIHLWDGVTFTSREEFREWFERLFSTSKDAWREIKSLEVRGDTVEVHVQLHFTLN

SEQ ID NO: 1047 - protein, 131 aa, synthetic construct
GQKHTVDLTHHFHFRGNRVTEVRVHITPVESADPERREGGGGPPPEEQIRQFLRRFYEALDSGDADTAASLFHPGVTIHLWDGVTFTSREEFREWFERLFSTSKDAWREIKSLEVRGDTVEVHVQLHFTLN

SEQ ID NO: 1048 - protein, 131 aa, synthetic construct
GQKHTVDLTHHFHFRGNRVTEVRVHITPVESATPGRREGGGGPPPEEQIRQFLRRFYEALDSGDADTAASLFHPGVTIHLWDGVTFTSREEFREWFERLFSTSKDAWREIKSLEVRGDTVEVHVQLHFTLN

SEQ ID NO: 1049 - protein, 131 aa, synthetic construct
GQKHTVDLTHHFHFRGNRVTEVRVHITPVESANPERHFSGGGPPSEEQIRQFLRRFYEALDSGDADTAASLFHPGVTIHLWDGVTFTSREEFREWFERLFSTSKDAWREIKSLEVRGDTVEVHVQLHFTLN

SEQ ID NO: 1050 - protein, 132 aa, synthetic construct
GQKHTVDLTHHFHFRGNRVTEVRVHINPTVDDLELERREVVGPAMSEEQIRQFLRRFYEALDSGDADTAASLFHPGVTIHLWDGVTFTSREEFREWFERLFSTSKDAWREIKSLEVRGDTVEVHVQLHFTLN

SEQ ID NO: 1051 - protein, 132 aa, synthetic construct
GQKHTVDLTHHFHFRGNRVTEVRVHITPVESAEWERTERLGPSAIPEEQIRQFLRRFYEALDSGDADTAASLFHPGVTIHLWDGVTFTSREEFREWFERLFSTSKDAWREIKSLEVRGDTVEVHVQLHFTLN

SEQ ID NO: 1052 - protein, 132 aa, synthetic construct
GQKHTVDLTHHFHFRGNRVTEVRVHITPVESAEWERTERLGPSEIPEEQIRQFLRRFYEALDSGDADTAASLFHPGVTIHLWDGVTFTSREEFREWFERLFSTSKDAWREIKSLEVRGDTVEVHVQLHFTLN

SEQ ID NO: 1053 - protein, 132 aa, synthetic construct
GQKHTVDLTHHFHFRGNRVTEVRVHITPVESAESERTERLGPSAIPEEQIRQFLRRFYEALDSGDADTAASLFHPGVTIHLWDGVTFTSREEFREWFERLFSTSKDAWREIKSLEVRGDTVEVHVQLHFTLN

SEQ ID NO: 1054 - protein, 132 aa, synthetic construct
GQKHTVDLTHHFHFRGNRVTEVRVHIQPVESSESERTERLGPSAIPEEQIRQFLRRFYEALDSGDADTAASLFHPGVTIHLWDGVTFTSREEFREWFERLFSTSKDAWREIKSLEVRGDTVEVHVQLHFTLN

SEQ ID NO: 1055 - protein, 132 aa, synthetic construct
GQKHTVDLTHHFHFRGNRVTEVRVHITPVDSAEWERTERLGPSAIPEEQIRQFLRRFYEALDSGDADTAASLFHPGVTIHLWDGVTFTSREEFREWFERLFSTSKDAWREIKSLEVRGDTVEVHVQLHFTLN

SEQ ID NO: 1056 - protein, 132 aa, synthetic construct
GQKHTVDLTHHFHFRGNRVTEVRVHITPVESSTSERTERLGPSAIPEEQIRQFLRRFYEALDSGDADTAASLFHPGVTIHLWDGVTFTSREEFREWFERLFSTSKDAWREIKSLEVRGDTVEVHVQLHFTLN

SEQ ID NO: 1057 - protein, 132 aa, synthetic construct
GQKHTVDLTHHFHFRGNRVTEVRVHITPVESSESERTERLGPSAIPEEQIRQFLRRFYEALDSGDADTAASLFHPGVTIHLWDGVTFTSREEFREWFERLFSTSKDAWREIKSLEVRGDTVEVHVQLHFTLN

SEQ ID NO: 1058 - protein, 132 aa, synthetic construct
GQKHTVDLTHHFHFRGNRVTEVRVHITPVSSASSERTERLGPSAIPEEQIRQFLRRFYEALDSGDADTAASLFHPGVTIHLWDGVTFTSREEFREWFERLFSTSKDAWREIKSLEVRGDTVEVHVQLHFTLN

SEQ ID NO: 1059 - protein, 132 aa, synthetic construct
GQKHTVDLTHHFHFRGNRVTEVRVHITPVESAEWERTERLEPSAIPEEQIRQFLRRFYEALDSGDADTAASLFHPGVTIHLWDGVTFTSREEFREWFERLFSTSKDAWREIKSLEVRGDTVEVHVQLHFTLN

SEQ ID NO: 1060 - protein, 132 aa, synthetic construct
GQKHTVDLTHHFHFRGNRVTEVRVHIEPVESAESERTERLGPSAIPEEQIRQFLRRFYEALDSGDADTAASLFHPGVTIHLWDGVTFTSREEFREWFERLFSTSKDAWREIKSLEVRGDTVEVHVQLHFTLN

SEQ ID NO: 1061 - protein, 132 aa, synthetic construct
GQKHTVDLTHHFHFRGNRVTEVRVHITPRESAESERTERLGPSAIPEEQIRQFLRRFYEALDSGDADTAASLFHPGVTIHLWDGVTFTSREEFREWFERLFSTSKDAWREIKSLEVRGDTVEVHVQLHFTLN

SEQ ID NO: 1062 - protein, 132 aa, synthetic construct
GQKHTVDLTHHFHFRGNRVTEVRVHITPVESAEWERTERLGPSTIPEEQIRQFLRRFYEALDSGDADTAASLFHPGVTIHLWDGVTFTSREEFREWFERLFSTSKDAWREIKSLEVRGDTVEVHVQLHFTLN

SEQ ID NO: 1063 - protein, 133 aa, synthetic construct
GQKHTVDLTHHFHFRGNRVTEVRVHINPTVDEELPLPRRERFGPAMSEEQIRQFLRRFYEALDSGDADTAASLFHPGVTIHLWDGVTFTSREEFREWFERLFSTSKDAWREIKSLEVRGDTVEVHVQLHFTLN

SEQ ID NO: 1064 - protein, 133 aa, synthetic construct
GQKHTVDLTHHFHFRGNRVTEVRVHITPLDAENPQPRTERFEPSAIPEEQIRQFLRRFYEALDSGDADTAASLFHPGVTIHLWDGVTFTSREEFREWFERLFSTSKDAWREIKSLEVRGDTVEVHVQLHFTLN

SEQ ID NO: 1065 - protein, 133 aa, synthetic construct
GQKHTVDLTHHFHFRGNRVTEVRVHITPLDHENPQPRTERFEPSAIPEEQIRQFLRRFYEALDSGDADTAASLFHPGVTIHLWDGVTFTSREEFREWFERLFSTSKDAWREIKSLEVRGDTVEVHVQLHFTLN

SEQ ID NO: 1066 - protein, 133 aa, synthetic construct
GQKHTVDLTHHFHFRGNRVTEVRVHITPLDAPNPQPRTERFEPSAIPEEQIRQFLRRFYEALDSGDADTAASLFHPGVTIHLWDGVTFTSREEFREWFERLFSTSKDAWREIKSLEVRGDTVEVHVQLHFTLN

SEQ ID NO: 1067 - protein, 133 aa, synthetic construct
GQKHTVDLTHHFHFRGNRVTEVRVHITPLDKENPQPRTERFGPSAIPEEQIRQFLRRFYEALDSGDADTAASLFHPGVTIHLWDGVTFTSREEFREWFERLFSTSKDAWREIKSLEVRGDTVEVHVQLHFTLN

SEQ ID NO: 1068 - protein, 133 aa, synthetic construct
GQKHTVDLTHHFHFRGNRVTEVRVHITPLDAENPQPRTERFEPSTIPEEQIRQFLRRFYEALDSGDADTAASLFHPGVTIHLWDGVTFTSREEFREWFERLFSTSKDAWREIKSLEVRGDTVEVHVQLHFTLN

SEQ ID NO: 1069 - protein, 133 aa, synthetic construct
GQKHTVDLTHHFHFRGNRVTEVRVHITPLDEERPQPRTERFEPSAIPEEQIRQFLRRFYEALDSGDADTAASLFHPGVTIHLWDGVTFTSREEFREWFERLFSTSKDAWREIKSLEVRGDTVEVHVQLHFTLN

SEQ ID NO: 1070 - protein, 133 aa, synthetic construct
GQKHTVDLTHHFHFRGNRVTEVRVHITPLDAENPQPRTERFEPSEIPEEQIRQFLRRFYEALDSGDADTAASLFHPGVTIHLWDGVTFTSREEFREWFERLFSTSKDAWREIKSLEVRGDTVEVHVQLHFTLN

SEQ ID NO: 1071 - protein, 133 aa, synthetic construct
GQKHTVDLTHHFHFRGNRVTEVRVHITPLDAENPQPRTERFEPSSIPEEQIRQFLRRFYEALDSGDADTAASLFHPGVTIHLWDGVTFTSREEFREWFERLFSTSKDAWREIKSLEVRGDTVEVHVQLHFTLN

SEQ ID NO: 1072 - protein, 134 aa, synthetic construct
GQKHTVDLTHHFHFRGNRVTEVRVHINPTVPDEDLEFPRREVFGPAMSEEQIRQFLRRFYEALDSGDADTAASLFHPGVTIHLWDGVTFTSREEFREWFERLFSTSKDAWREIKSLEVRGDTVEVHVQLHFTLN

SEQ ID NO: 1073 - protein, 134 aa, synthetic construct
GQKHTVDLTHHFHFRGNRVTEVRVHITELPEDDVKRERSERFGPSAIPEEQIRQFLRRFYEALDSGDADTAASLFHPGVTIHLWDGVTFTSREEFREWFERLFSTSKDAWREIKSLEVRGDTVEVHVQLHFTLN

SEQ ID NO: 1074 - protein, 134 aa, synthetic construct
GQKHTVDLTHHFHFRGNRVTEVRVHITELPGTDVRRPRSERFGPSAIPEEQIRQFLRRFYEALDSGDADTAASLFHPGVTIHLWDGVTFTSREEFREWFERLFSTSKDAWREIKSLEVRGDTVEVHVQLHFTLN

SEQ ID NO: 1075 - protein, 134 aa, synthetic construct
GQKHTVDLTHHFHFRGNRVTEVRVHITELPGEDVERPRTERLGPSAIPEEQIRQFLRRFYEALDSGDADTAASLFHPGVTIHLWDGVTFTSREEFREWFERLFSTSKDAWREIKSLEVRGDTVEVHVQLHFTLN

SEQ ID NO: 1076 - protein, 134 aa, synthetic construct
GQKHTVDLTHHFHFRGNRVTEVRVHITPLPGTDVKKPRTERLGPSAIPEEQIRQFLRRFYEALDSGDADTAASLFHPGVTIHLWDGVTFTSREEFREWFERLFSTSKDAWREIKSLEVRGDTVEVHVQLHFTLN

SEQ ID NO: 1077 - protein, 134 aa, synthetic construct
GQKHTVDLTHHFHFRGNRVTEVRVHITELPGDDVERPRTERFGPSAIPEEQIRQFLRRFYEALDSGDADTAASLFHPGVTIHLWDGVTFTSREEFREWFERLFSTSKDAWREIKSLEVRGDTVEVHVQLHFTLN

SEQ ID NO: 1078 - protein, 134 aa, synthetic construct
GQKHTVDLTHHFHFRGNRVTEVRVHITELPEDDVELPRTERFGPSAIPEEQIRQFLRRFYEALDSGDADTAASLFHPGVTIHLWDGVTFTSREEFREWFERLFSTSKDAWREIKSLEVRGDTVEVHVQLHFTLN

SEQ ID NO: 1079 - protein, 134 aa, synthetic construct
GQKHTVDLTHHFHFRGNRVTEVRVHITELPEDNVEKPRSERFGPSAIPEEQIRQFLRRFYEALDSGDADTAASLFHPGVTIHLWDGVTFTSREEFREWFERLFSTSKDAWREIKSLEVRGDTVEVHVQLHFTLN

SEQ ID NO: 1080 - protein, 134 aa, synthetic construct
GQKHTVDLTHHFHFRGNRVTEVRVHIEELPEDDVRRPRTERLGPSAIPEEQIRQFLRRFYEALDSGDADTAASLFHPGVTIHLWDGVTFTSREEFREWFERLFSTSKDAWREIKSLEVRGDTVEVHVQLHFTLN

SEQ ID NO: 1081 - protein, 134 aa, synthetic construct
GQKHTVDLTHHFHFRGNRVTEVRVHITELPEDDVERPRTERFGPSAIPEEQIRQFLRRFYEALDSGDADTAASLFHPGVTIHLWDGVTFTSREEFREWFERLFSTSKDAWREIKSLEVRGDTVEVHVQLHFTLN

SEQ ID NO: 1082 - protein, 134 aa, synthetic construct
GQKHTVDLTHHFHFRGNRVTEVRVHIRELPGTDVERPRTERLGPSAIPEEQIRQFLRRFYEALDSGDADTAASLFHPGVTIHLWDGVTFTSREEFREWFERLFSTSKDAWREIKSLEVRGDTVEVHVQLHFTLN

SEQ ID NO: 1083 - protein, 134 aa, synthetic construct
GQKHTVDLTHHFHFRGNRVTEVRVHIRELPEEDVELPREERFGPSAIPEEQIRQFLRRFYEALDSGDADTAASLFHPGVTIHLWDGVTFTSREEFREWFERLFSTSKDAWREIKSLEVRGDTVEVHVQLHFTLN

SEQ ID NO: 1084 - protein, 134 aa, synthetic construct
GQKHTVDLTHHFHFRGNRVTEVRVHIEELPGTDVQKPRTERFGPSAIPEEQIRQFLRRFYEALDSGDADTAASLFHPGVTIHLWDGVTFTSREEFREWFERLFSTSKDAWREIKSLEVRGDTVEVHVQLHFTLN

SEQ ID NO: 1085 - protein, 134 aa, synthetic construct
GQKHTVDLTHHFHFRGNRVTEVRVHITELPGEDVERPREERLGPSAIPEEQIRQFLRRFYEALDSGDADTAASLFHPGVTIHLWDGVTFTSREEFREWFERLFSTSKDAWREIKSLEVRGDTVEVHVQLHFTLN

SEQ ID NO: 1086 - protein, 134 aa, synthetic construct
GQKHTVDLTHHFHFRGNRVTEVRVHITELPGDNVERPRTERFGPSAIPEEQIRQFLRRFYEALDSGDADTAASLFHPGVTIHLWDGVTFTSREEFREWFERLFSTSKDAWREIKSLEVRGDTVEVHVQLHFTLN

SEQ ID NO: 1087 - protein, 134 aa, synthetic construct
GQKHTVDLTHHFHFRGNRVTEVRVHITELPSTDVERPRTERFGPSAIPEEQIRQFLRRFYEALDSGDADTAASLFHPGVTIHLWDGVTFTSREEFREWFERLFSTSKDAWREIKSLEVRGDTVEVHVQLHFTLN

SEQ ID NO: 1088 - protein, 134 aa, synthetic construct
GQKHTVDLTHHFHFRGNRVTEVRVHIEELPGENVERPRTERLGPSSIPEEQIRQFLRRFYEALDSGDADTAASLFHPGVTIHLWDGVTFTSREEFREWFERLFSTSKDAWREIKSLEVRGDTVEVHVQLHFTLN

SEQ ID NO: 1089 - protein, 134 aa, synthetic construct
GQKHTVDLTHHFHFRGNRVTEVRVHITEVPEDDVERPRRERFGPSAIPEEQIRQFLRRFYEALDSGDADTAASLFHPGVTIHLWDGVTFTSREEFREWFERLFSTSKDAWREIKSLEVRGDTVEVHVQLHFTLN

SEQ ID NO: 1090 - protein, 134 aa, synthetic construct
GQKHTVDLTHHFHFRGNRVTEVRVHIEELPSEDVELPRTERLGPSSIPEEQIRQFLRRFYEALDSGDADTAASLFHPGVTIHLWDGVTFTSREEFREWFERLFSTSKDAWREIKSLEVRGDTVEVHVQLHFTLN

SEQ ID NO: 1091 - protein, 134 aa, synthetic construct
GQKHTVDLTHHFHFRGNRVTEVRVHITELPSTDVKKPRTERFGPSAIPEEQIRQFLRRFYEALDSGDADTAASLFHPGVTIHLWDGVTFTSREEFREWFERLFSTSKDAWREIKSLEVRGDTVEVHVQLHFTLN

SEQ ID NO: 1092 - protein, 134 aa, synthetic construct
GQKHTVDLTHHFHFRGNRVTEVRVHIEELPGENVERPRTERLGPSAIPEEQIRQFLRRFYEALDSGDADTAASLFHPGVTIHLWDGVTFTSREEFREWFERLFSTSKDAWREIKSLEVRGDTVEVHVQLHFTLN

SEQ ID NO: 1093 - protein, 135 aa, synthetic construct
GQKHTVDLTHHFHFRGNRVTEVRVHINPTVPDEELEPLPRRERVGPAMSEEQIRQFLRRFYEALDSGDADTAASLFHPGVTIHLWDGVTFTSREEFREWFERLFSTSKDAWREIKSLEVRGDTVEVHVQLHFTLN

SEQ ID NO: 1094 - protein, 135 aa, synthetic construct
GQKHTVDLTHHFHFRGNRVTEVRVHITPLPTDTADPTGRSERFGPSEIPEEQIRQFLRRFYEALDSGDADTAASLFHPGVTIHLWDGVTFTSREEFREWFERLFSTSKDAWREIKSLEVRGDTVEVHVQLHFTLN

SEQ ID NO: 1095 - protein, 135 aa, synthetic construct
GQKHTVDLTHHFHFRGNRVTEVRVHITPLPGEEADPSGRSERFGPSAIPEEQIRQFLRRFYEALDSGDADTAASLFHPGVTIHLWDGVTFTSREEFREWFERLFSTSKDAWREIKSLEVRGDTVEVHVQLHFTLN

SEQ ID NO: 1096 - protein, 135 aa, synthetic construct
GQKHTVDLTHHFHFRGNRVTEVRVHITPLPGDTADPSGRSERFGPSAIPEEQIRQFLRRFYEALDSGDADTAASLFHPGVTIHLWDGVTFTSREEFREWFERLFSTSKDAWREIKSLEVRGDTVEVHVQLHFTLN

SEQ ID NO: 1097 - protein, 135 aa, synthetic construct
GQKHTVDLTHHFHFRGNRVTEVRVHITPLPGDEADPSGRSERFEASTIPEEQIRQFLRRFYEALDSGDADTAASLFHPGVTIHLWDGVTFTSREEFREWFERLFSTSKDAWREIKSLEVRGDTVEVHVQLHFTLN

SEQ ID NO: 1098 - protein, 135 aa, synthetic construct
GQKHTVDLTHHFHFRGNRVTEVRVHIEELPGDTADPSGRSERFEPSEIPEEQIRQFLRRFYEALDSGDADTAASLFHPGVTIHLWDGVTFTSREEFREWFERLFSTSKDAWREIKSLEVRGDTVEVHVQLHFTLN

SEQ ID NO: 1099 - protein, 135 aa, synthetic construct
GQKHTVDLTHHFHFRGNRVTEVRVHITPLPGEESDPSGRSERFGPSTIPEEQIRQFLRRFYEALDSGDADTAASLFHPGVTIHLWDGVTFTSREEFREWFERLFSTSKDAWREIKSLEVRGDTVEVHVQLHFTLN

SEQ ID NO: 1100 - protein, 135 aa, synthetic construct
GQKHTVDLTHHFHFRGNRVTEVRVHITPLPGEEYDPSGRSERFGPSAIPEEQIRQFLRRFYEALDSGDADTAASLFHPGVTIHLWDGVTFTSREEFREWFERLFSTSKDAWREIKSLEVRGDTVEVHVQLHFTLN

SEQ ID NO: 1101 - protein, 135 aa, synthetic construct
GQKHTVDLTHHFHFRGNRVTEVRVHITPLPGDEADPSGRSERFGPSAIPEEQIRQFLRRFYEALDSGDADTAASLFHPGVTIHLWDGVTFTSREEFREWFERLFSTSKDAWREIKSLEVRGDTVEVHVQLHFTLN

SEQ ID NO: 1102 - protein, 135 aa, synthetic construct
GQKHTVDLTHHFHFRGNRVTEVRVHITPLPGTEADPSGRSERFGPSSIPEEQIRQFLRRFYEALDSGDADTAASLFHPGVTIHLWDGVTFTSREEFREWFERLFSTSKDAWREIKSLEVRGDTVEVHVQLHFTLN

SEQ ID NO: 1103 - protein, 135 aa, synthetic construct
GQKHTVDLTHHFHFRGNRVTEVRVHIEVLPGEDYDPSGRSERFEESSIPEEQIRQFLRRFYEALDSGDADTAASLFHPGVTIHLWDGVTFTSREEFREWFERLFSTSKDAWREIKSLEVRGDTVEVHVQLHFTLN

SEQ ID NO: 1104 - protein, 135 aa, synthetic construct
GQKHTVDLTHHFHFRGNRVTEVRVHITVLPGEDADPSGRSERFGPSTIPEEQIRQFLRRFYEALDSGDADTAASLFHPGVTIHLWDGVTFTSREEFREWFERLFSTSKDAWREIKSLEVRGDTVEVHVQLHFTLN

SEQ ID NO: 1105 - protein, 135 aa, synthetic construct
GQKHTVDLTHHFHFRGNRVTEVRVHITPLPSDTFDPSGRSERFGPSAIPEEQIRQFLRRFYEALDSGDADTAASLFHPGVTIHLWDGVTFTSREEFREWFERLFSTSKDAWREIKSLEVRGDTVEVHVQLHFTLN

SEQ ID NO: 1106 - protein, 135 aa, synthetic construct
GQKHTVDLTHHFHFRGNRVTEVRVHITVLPGDTADPSGRSERFGPSAIPEEQIRQFLRRFYEALDSGDADTAASLFHPGVTIHLWDGVTFTSREEFREWFERLFSTSKDAWREIKSLEVRGDTVEVHVQLHFTLN

SEQ ID NO: 1107 - protein, 135 aa, synthetic construct
GQKHTVDLTHHFHFRGNRVTEVRVHITPLPGEDYDPSGRSERFGPSSIPEEQIRQFLRRFYEALDSGDADTAASLFHPGVTIHLWDGVTFTSREEFREWFERLFSTSKDAWREIKSLEVRGDTVEVHVQLHFTLN

SEQ ID NO: 1108 - protein, 135 aa, synthetic construct
GQKHTVDLTHHFHFRGNRVTEVRVHITPLPGEEADPTGRSERFGPSEIPEEQIRQFLRRFYEALDSGDADTAASLFHPGVTIHLWDGVTFTSREEFREWFERLFSTSKDAWREIKSLEVRGDTVEVHVQLHFTLN

SEQ ID NO: 1109 - protein, 135 aa, synthetic construct
GQKHTVDLTHHFHFRGNRVTEVRVHITPLPGDTANPEGRSERFGPSSIPEEQIRQFLRRFYEALDSGDADTAASLFHPGVTIHLWDGVTFTSREEFREWFERLFSTSKDAWREIKSLEVRGDTVEVHVQLHFTLN

SEQ ID NO: 1110 - protein, 135 aa, synthetic construct
GQKHTVDLTHHFHFRGNRVTEVRVHITELPGDEADPTGRSERFGPSEIPEEQIRQFLRRFYEALDSGDADTAASLFHPGVTIHLWDGVTFTSREEFREWFERLFSTSKDAWREIKSLEVRGDTVEVHVQLHFTLN

SEQ ID NO: 1111 - protein, 135 aa, synthetic construct
GQKHTVDLTHHFHFRGNRVTEVRVHITVLPSTESDPSDRSERFGPSAIPEEQIRQFLRRFYEALDSGDADTAASLFHPGVTIHLWDGVTFTSREEFREWFERLFSTSKDAWREIKSLEVRGDTVEVHVQLHFTLN

SEQ ID NO: 1112 - protein, 135 aa, synthetic construct
GQKHTVDLTHHFHFRGNRVTEVRVHITELPGDEADPSGRSERFGPSTIPEEQIRQFLRRFYEALDSGDADTAASLFHPGVTIHLWDGVTFTSREEFREWFERLFSTSKDAWREIKSLEVRGDTVEVHVQLHFTLN

SEQ ID NO: 1113 - protein, 135 aa, synthetic construct
GQKHTVDLTHHFHFRGNRVTEVRVHIEVLPGDEADPSGRSERFGPSAIPEEQIRQFLRRFYEALDSGDADTAASLFHPGVTIHLWDGVTFTSREEFREWFERLFSTSKDAWREIKSLEVRGDTVEVHVQLHFTLN

SEQ ID NO: 1114 - protein, 136 aa, synthetic construct
GQKHTVDLTHHFHFRGNRVTEVRVHINPTVPDEELPLLLRRVEVVGPAMSEEQIRQFLRRFYEALDSGDADTAASLFHPGVTIHLWDGVTFTSREEFREWFERLFSTSKDAWREIKSLEVRGDTVEVHVQLHFTLN

SEQ ID NO: 1115 - protein, 136 aa, synthetic construct
GQKHTVDLTHHFHFRGNRVTEVRVHIEELPGDEAPVDRAAVERLGPSAIPEEQIRQFLRRFYEALDSGDADTAASLFHPGVTIHLWDGVTFTSREEFREWFERLFSTSKDAWREIKSLEVRGDTVEVHVQLHFTLN

SEQ ID NO: 1116 - protein, 136 aa, synthetic construct
GQKHTVDLTHHFHFRGNRVTEVRVHIEVLPGSESPVDLSTTERLEPSTIPEEQIRQFLRRFYEALDSGDADTAASLFHPGVTIHLWDGVTFTSREEFREWFERLFSTSKDAWREIKSLEVRGDTVEVHVQLHFTLN

SEQ ID NO: 1117 - protein, 136 aa, synthetic construct
GQKHTVDLTHHFHFRGNRVTEVRVHITPLPGDESPVDLSTQERLGPSAIPEEQIRQFLRRFYEALDSGDADTAASLFHPGVTIHLWDGVTFTSREEFREWFERLFSTSKDAWREIKSLEVRGDTVEVHVQLHFTLN

SEQ ID NO: 1118 - protein, 136 aa, synthetic construct
GQKHTVDLTHHFHFRGNRVTEVRVHIEERPGDEAPVDTSLVERLGPSEIPEEQIRQFLRRFYEALDSGDADTAASLFHPGVTIHLWDGVTFTSREEFREWFERLFSTSKDAWREIKSLEVRGDTVEVHVQLHFTLN

SEQ ID NO: 1119 - protein, 136 aa, synthetic construct
GQKHTVDLTHHFHFRGNRVTEVRVHIDVHPGSENPADRSLRERLEPSAVPEEQIRQFLRRFYEALDSGDADTAASLFHPGVTIHLWDGVTFTSREEFREWFERLFSTSKDAWREIKSLEVRGDTVEVHVQLHFTLN

SEQ ID NO: 1120 - protein, 136 aa, synthetic construct
GQKHTVDLTHHFHFRGNRVTEVRVHIDVNPGAEAPVSRDFREVLGPSEIPEEQIRQFLRRFYEALDSGDADTAASLFHPGVTIHLWDGVTFTSREEFREWFERLFSTSKDAWREIKSLEVRGDTVEVHVQLHFTLN

SEQ ID NO: 1121 - protein, 136 aa, synthetic construct
GQKHTVDLTHHFHFRGNRVTEVRVHINVLPGSESPSDRSLRERLGPSEIPEEQIRQFLRRFYEALDSGDADTAASLFHPGVTIHLWDGVTFTSREEFREWFERLFSTSKDAWREIKSLEVRGDTVEVHVQLHFTLN

SEQ ID NO: 1122 - protein, 136 aa, synthetic construct
GQKHTVDLTHHFHFRGNRVTEVRVHIEVHPGSENPAPRDLRERLGPSAIPEEQIRQFLRRFYEALDSGDADTAASLFHPGVTIHLWDGVTFTSREEFREWFERLFSTSKDAWREIKSLEVRGDTVEVHVQLHFTLN

SEQ ID NO: 1123 - protein, 136 aa, synthetic construct
GQKHTVDLTHHFHFRGNRVTEVRVHITPLPGSESPVSTELEERLEPSAIPEEQIRQFLRRFYEALDSGDADTAASLFHPGVTIHLWDGVTFTSREEFREWFERLFSTSKDAWREIKSLEVRGDTVEVHVQLHFTLN

SEQ ID NO: 1124 - protein, 136 aa, synthetic construct
GQKHTVDLTHHFHFRGNRVTEVRVHITVNPGSESPTSTDLEERLGPSAIPEEQIRQFLRRFYEALDSGDADTAASLFHPGVTIHLWDGVTFTSREEFREWFERLFSTSKDAWREIKSLEVRGDTVEVHVQLHFTLN

SEQ ID NO: 1125 - protein, 136 aa, synthetic construct
GQKHTVDLTHHFHFRGNRVTEVRVHINVLPGSESPTDTSTKETLGPSTIPEEQIRQFLRRFYEALDSGDADTAASLFHPGVTIHLWDGVTFTSREEFREWFERLFSTSKDAWREIKSLEVRGDTVEVHVQLHFTLN

SEQ ID NO: 1126 - protein, 136 aa, synthetic construct
GQKHTVDLTHHFHFRGNRVTEVRVHITPHPGSSLPTDTSVREVLGPSSIPEEQIRQFLRRFYEALDSGDADTAASLFHPGVTIHLWDGVTFTSREEFREWFERLFSTSKDAWREIKSLEVRGDTVEVHVQLHFTLN

SEQ ID NO: 1127 - protein, 136 aa, synthetic construct
GQKHTVDLTHHFHFRGNRVTEVRVHIEVRPGSEAPTSRALRERLGPSAVPEEQIRQFLRRFYEALDSGDADTAASLFHPGVTIHLWDGVTFTSREEFREWFERLFSTSKDAWREIKSLEVRGDTVEVHVQLHFTLN

SEQ ID NO: 1128 - protein, 136 aa, synthetic construct
GQKHTVDLTHHFHFRGNRVTEVRVHIEVRPGSENPASTALTERLGPSAIPEEQIRQFLRRFYEALDSGDADTAASLFHPGVTIHLWDGVTFTSREEFREWFERLFSTSKDAWREIKSLEVRGDTVEVHVQLHFTLN

SEQ ID NO: 1129 - protein, 136 aa, synthetic construct
GQKHTVDLTHHFHFRGNRVTEVRVHINVNPGSESPVSTALTERLEPSAWPEEQIRQFLRRFYEALDSGDADTAASLFHPGVTIHLWDGVTFTSREEFREWFERLFSTSKDAWREIKSLEVRGDTVEVHVQLHFTLN

SEQ ID NO: 1130 - protein, 136 aa, synthetic construct
GQKHTVDLTHHFHFRGNRVTEVRVHIEVNPGSESPSDSSLQERLEPSEIPEEQIRQFLRRFYEALDSGDADTAASLFHPGVTIHLWDGVTFTSREEFREWFERLFSTSKDAWREIKSLEVRGDTVEVHVQLHFTLN

SEQ ID NO: 1131 - protein, 136 aa, synthetic construct
GQKHTVDLTHHFHFRGNRVTEVRVHIDVNPGSEAPVDTSLVERLEPSAIPEEQIRQFLRRFYEALDSGDADTAASLFHPGVTIHLWDGVTFTSREEFREWFERLFSTSKDAWREIKSLEVRGDTVEVHVQLHFTLN

SEQ ID NO: 1132 - protein, 136 aa, synthetic construct
GQKHTVDLTHHFHFRGNRVTEVRVHITVNPGSENPSSTATRERLGPSEIPEEQIRQFLRRFYEALDSGDADTAASLFHPGVTIHLWDGVTFTSREEFREWFERLFSTSKDAWREIKSLEVRGDTVEVHVQLHFTLN

SEQ ID NO: 1133 - protein, 136 aa, synthetic construct
GQKHTVDLTHHFHFRGNRVTEVRVHIEELPGDESPVDRSLVERLGPSAVPEEQIRQFLRRFYEALDSGDADTAASLFHPGVTIHLWDGVTFTSREEFREWFERLFSTSKDAWREIKSLEVRGDTVEVHVQLHFTLN

SEQ ID NO: 1134 - protein, 136 aa, synthetic construct
GQKHTVDLTHHFHFRGNRVTEVRVHIDVLPGSESPTSTETREVLGPSAIPEEQIRQFLRRFYEALDSGDADTAASLFHPGVTIHLWDGVTFTSREEFREWFERLFSTSKDAWREIKSLEVRGDTVEVHVQLHFTLN

SEQ ID NO: 1135 - protein, 137 aa, synthetic construct
GQKHTVDLTHHFHFRGNRVTEVRVHINPTVPDEELPLLRRRRVVVLGGLMSEEQIRQFLRRFYEALDSGDADTAASLFHPGVTIHLWDGVTFTSREEFREWFERLFSTSKDAWREIKSLEVRGDTVEVHVQLHFTLN

SEQ ID NO: 1136 - protein, 137 aa, synthetic construct
GQKHTVDLTHHFHFRGNRVTEVRVHIEERPEEESTEEPEFELRVGGPSSISEEQIRQFLRRFYEALDSGDADTAASLFHPGVTIHLWDGVTFTSREEFREWFERLFSTSKDAWREIKSLEVRGDTVEVHVQLHFTLN

SEQ ID NO: 1137 - protein, 137 aa, synthetic construct
GQKHTVDLTHHFHFRGNRVTEVRVHIEERPEEESDEEPEETIRVEGPSSISEEQIRQFLRRFYEALDSGDADTAASLFHPGVTIHLWDGVTFTSREEFREWFERLFSTSKDAWREIKSLEVRGDTVEVHVQLHFTLN

SEQ ID NO: 1138 - protein, 137 aa, synthetic construct
GQKHTVDLTHHFHFRGNRVTEVRVHIEERPEEESDEEPEFEVRVGGPSSISEEQIRQFLRRFYEALDSGDADTAASLFHPGVTIHLWDGVTFTSREEFREWFERLFSTSKDAWREIKSLEVRGDTVEVHVQLHFTLN

SEQ ID NO: 1139 - protein, 137 aa, synthetic construct
GQKHTVDLTHHFHFRGNRVTEVRVHIEERPEAESDEEPEFVLRVGGPSSISEEQIRQFLRRFYEALDSGDADTAASLFHPGVTIHLWDGVTFTSREEFREWFERLFSTSKDAWREIKSLEVRGDTVEVHVQLHFTLN

SEQ ID NO: 1140 - protein, 137 aa, synthetic construct
GQKHTVDLTHHFHFRGNRVTEVRVHITERPEDESEEEPEFELRVGGPSSISEEQIRQFLRRFYEALDSGDADTAASLFHPGVTIHLWDGVTFTSREEFREWFERLFSTSKDAWREIKSLEVRGDTVEVHVQLHFTLN

SEQ ID NO: 1141 - protein, 137 aa, synthetic construct
GQKHTVDLTHHFHFRGNRVTEVRVHIEERPEDESEEELEETIRVEGPSSISEEQIRQFLRRFYEALDSGDADTAASLFHPGVTIHLWDGVTFTSREEFREWFERLFSTSKDAWREIKSLEVRGDTVEVHVQLHFTLN

SEQ ID NO: 1142 - protein, 137 aa, synthetic construct
GQKHTVDLTHHFHFRGNRVTEVRVHIEERPEDESEEEPEFTLRVGGPSGISEEQIRQFLRRFYEALDSGDADTAASLFHPGVTIHLWDGVTFTSREEFREWFERLFSTSKDAWREIKSLEVRGDTVEVHVQLHFTLN

SEQ ID NO: 1143 - protein, 137 aa, synthetic construct
GQKHTVDLTHHFHFRGNRVTEVRVHIEVNPEAESEEEPEFELRVGGPSSISEEQIRQFLRRFYEALDSGDADTAASLFHPGVTIHLWDGVTFTSREEFREWFERLFSTSKDAWREIKSLEVRGDTVEVHVQLHFTLN

SEQ ID NO: 1144 - protein, 137 aa, synthetic construct
GQKHTVDLTHHFHFRGNRVTEVRVHIRERPEAESEEEPEFRLVVGGPSSISEEQIRQFLRRFYEALDSGDADTAASLFHPGVTIHLWDGVTFTSREEFREWFERLFSTSKDAWREIKSLEVRGDTVEVHVQLHFTLN

SEQ ID NO: 1145 - protein, 137 aa, synthetic construct
GQKHTVDLTHHFHFRGNRVTEVRVHIEENPEEESDEEPEFELRVEGPSSISEEQIRQFLRRFYEALDSGDADTAASLFHPGVTIHLWDGVTFTSREEFREWFERLFSTSKDAWREIKSLEVRGDTVEVHVQLHFTLN

SEQ ID NO: 1146 - protein, 137 aa, synthetic construct
GQKHTVDLTHHFHFRGNRVTEVRVHIEERPEEESEEELEFTLRVGGPSSISEEQIRQFLRRFYEALDSGDADTAASLFHPGVTIHLWDGVTFTSREEFREWFERLFSTSKDAWREIKSLEVRGDTVEVHVQLHFTLN

SEQ ID NO: 1147 - protein, 137 aa, synthetic construct
GQKHTVDLTHHFHFRGNRVTEVRVHIEERPEEESEEEPEFTLTVGGPSSISEEQIRQFLRRFYEALDSGDADTAASLFHPGVTIHLWDGVTFTSREEFREWFERLFSTSKDAWREIKSLEVRGDTVEVHVQLHFTLN

SEQ ID NO: 1148 - protein, 137 aa, synthetic construct
GQKHTVDLTHHFHFRGNRVTEVRVHIEVRPEEESEEEPEFELRVGGPSSISEEQIRQFLRRFYEALDSGDADTAASLFHPGVTIHLWDGVTFTSREEFREWFERLFSTSKDAWREIKSLEVRGDTVEVHVQLHFTLN

SEQ ID NO: 1149 - protein, 137 aa, synthetic construct
GQKHTVDLTHHFHFRGNRVTEVRVHIEERPEEESEEEPEFRLTVGGPSSISEEQIRQFLRRFYEALDSGDADTAASLFHPGVTIHLWDGVTFTSREEFREWFERLFSTSKDAWREIKSLEVRGDTVEVHVQLHFTLN

SEQ ID NO: 1150 - protein, 137 aa, synthetic construct
GQKHTVDLTHHFHFRGNRVTEVRVHIEVRPESESTEEPEFTLRVGGPSSISEEQIRQFLRRFYEALDSGDADTAASLFHPGVTIHLWDGVTFTSREEFREWFERLFSTSKDAWREIKSLEVRGDTVEVHVQLHFTLN

SEQ ID NO: 1151 - protein, 137 aa, synthetic construct
GQKHTVDLTHHFHFRGNRVTEVRVHITENPEEESTEEPEFTLRVGGPSSIPEEQIRQFLRRFYEALDSGDADTAASLFHPGVTIHLWDGVTFTSREEFREWFERLFSTSKDAWREIKSLEVRGDTVEVHVQLHFTLN

SEQ ID NO: 1152 - protein, 137 aa, synthetic construct
GQKHTVDLTHHFHFRGNRVTEVRVHITERPEEESEEEPEFTLRVEGPSSIPEEQIRQFLRRFYEALDSGDADTAASLFHPGVTIHLWDGVTFTSREEFREWFERLFSTSKDAWREIKSLEVRGDTVEVHVQLHFTLN

SEQ ID NO: 1153 - protein, 137 aa, synthetic construct
GQKHTVDLTHHFHFRGNRVTEVRVHIEERPEAESSEEPEFTLTVGGPSSISEEQIRQFLRRFYEALDSGDADTAASLFHPGVTIHLWDGVTFTSREEFREWFERLFSTSKDAWREIKSLEVRGDTVEVHVQLHFTLN

SEQ ID NO: 1154 - protein, 137 aa, synthetic construct
GQKHTVDLTHHFHFRGNRVTEVRVHIEERPEEESDEELEFELRVGGPSSISEEQIRQFLRRFYEALDSGDADTAASLFHPGVTIHLWDGVTFTSREEFREWFERLFSTSKDAWREIKSLEVRGDTVEVHVQLHFTLN

SEQ ID NO: 1155 - protein, 137 aa, synthetic construct
GQKHTVDLTHHFHFRGNRVTEVRVHITVNPEDESDEEPEFTLRVGGPSSISEEQIRQFLRRFYEALDSGDADTAASLFHPGVTIHLWDGVTFTSREEFREWFERLFSTSKDAWREIKSLEVRGDTVEVHVQLHFTLN

SEQ ID NO: 1156 - protein, 138 aa, synthetic construct
GQKHTVDLTHHFHFRGNRVTEVRVHINPTVPGEEEAERLRALRLEVVGPAMSEEQIRQFLRRFYEALDSGDADTAASLFHPGVTIHLWDGVTFTSREEFREWFERLFSTSKDAWREIKSLEVRGDTVEVHVQLHFTLN

SEQ ID NO: 1157 - protein, 138 aa, synthetic construct
GQKHTVDLTHHFHFRGNRVTEVRVHITPLPGEAEAEALRAQRREVLEPSAIPEEQIRQFLRRFYEALDSGDADTAASLFHPGVTIHLWDGVTFTSREEFREWFERLFSTSKDAWREIKSLEVRGDTVEVHVQLHFTLN

SEQ ID NO: 1158 - protein, 138 aa, synthetic construct
GQKHTVDLTHHFHFRGNRVTEVRVHITPLPGEAEAEALLAQRAERLEPSAIPEEQIRQFLRRFYEALDSGDADTAASLFHPGVTIHLWDGVTFTSREEFREWFERLFSTSKDAWREIKSLEVRGDTVEVHVQLHFTLN

SEQ ID NO: 1159 - protein, 138 aa, synthetic construct
GQKHTVDLTHHFHFRGNRVTEVRVHIRPLPGEEEAEALRAQRREVLGPSAIPEEQIRQFLRRFYEALDSGDADTAASLFHPGVTIHLWDGVTFTSREEFREWFERLFSTSKDAWREIKSLEVRGDTVEVHVQLHFTLN

SEQ ID NO: 1160 - protein, 138 aa, synthetic construct
GQKHTVDLTHHFHFRGNRVTEVRVHITPLPGEAEAEALRAQRREVLGPSTIPEEQIRQFLRRFYEALDSGDADTAASLFHPGVTIHLWDGVTFTSREEFREWFERLFSTSKDAWREIKSLEVRGDTVEVHVQLHFTLN

SEQ ID NO: 1161 - protein, 138 aa, synthetic construct
GQKHTVDLTHHFHFRGNRVTEVRVHIRPLPGEEEAEALLAQRREVLGPSAIPEEQIRQFLRRFYEALDSGDADTAASLFHPGVTIHLWDGVTFTSREEFREWFERLFSTSKDAWREIKSLEVRGDTVEVHVQLHFTLN

SEQ ID NO: 1162 - protein, 138 aa, synthetic construct
GQKHTVDLTHHFHFRGNRVTEVRVHIRPLPGEAEAEALLAQRREVLGPSTIPEEQIRQFLRRFYEALDSGDADTAASLFHPGVTIHLWDGVTFTSREEFREWFERLFSTSKDAWREIKSLEVRGDTVEVHVQLHFTLN

SEQ ID NO: 1163 - protein, 138 aa, synthetic construct
GQKHTVDLTHHFHFRGNRVTEVRVHITPLPGQEEADRLLAQRAERLGPSAIPEEQIRQFLRRFYEALDSGDADTAASLFHPGVTIHLWDGVTFTSREEFREWFERLFSTSKDAWREIKSLEVRGDTVEVHVQLHFTLN

SEQ ID NO: 1164 - protein, 138 aa, synthetic construct
GQKHTVDLTHHFHFRGNRVTEVRVHITPLPGEAEAEALLAQREERLGPSAIPEEQIRQFLRRFYEALDSGDADTAASLFHPGVTIHLWDGVTFTSREEFREWFERLFSTSKDAWREIKSLEVRGDTVEVHVQLHFTLN

SEQ ID NO: 1165 - protein, 138 aa, synthetic construct
GQKHTVDLTHHFHFRGNRVTEVRVHITPLPGEAEAEALLAQRRERLEPSAIPEEQIRQFLRRFYEALDSGDADTAASLFHPGVTIHLWDGVTFTSREEFREWFERLFSTSKDAWREIKSLEVRGDTVEVHVQLHFTLN

SEQ ID NO: 1166 - protein, 138 aa, synthetic construct
GQKHTVDLTHHFHFRGNRVTEVRVHITPLPGEAEAEALRAQRREVLGPSAIPEEQIRQFLRRFYEALDSGDADTAASLFHPGVTIHLWDGVTFTSREEFREWFERLFSTSKDAWREIKSLEVRGDTVEVHVQLHFTLN

SEQ ID NO: 1167 - protein, 138 aa, synthetic construct
GQKHTVDLTHHFHFRGNRVTEVRVHITPLPGEAEAEALLAQRREVLGPSAIPEEQIRQFLRRFYEALDSGDADTAASLFHPGVTIHLWDGVTFTSREEFREWFERLFSTSKDAWREIKSLEVRGDTVEVHVQLHFTLN

SEQ ID NO: 1168 - protein, 138 aa, synthetic construct
GQKHTVDLTHHFHFRGNRVTEVRVHIRPLPGEEEAEKLRAQRREVLGPSAIPEEQIRQFLRRFYEALDSGDADTAASLFHPGVTIHLWDGVTFTSREEFREWFERLFSTSKDAWREIKSLEVRGDTVEVHVQLHFTLN

SEQ ID NO: 1169 - protein, 138 aa, synthetic construct
GQKHTVDLTHHFHFRGNRVTEVRVHITPLPGEAEAQALLAQRREVLGPSEIPEEQIRQFLRRFYEALDSGDADTAASLFHPGVTIHLWDGVTFTSREEFREWFERLFSTSKDAWREIKSLEVRGDTVEVHVQLHFTLN

SEQ ID NO: 1170 - protein, 138 aa, synthetic construct
GQKHTVDLTHHFHFRGNRVTEVRVHIRPLPGEEEAAALLAQRREVLGPSAIPEEQIRQFLRRFYEALDSGDADTAASLFHPGVTIHLWDGVTFTSREEFREWFERLFSTSKDAWREIKSLEVRGDTVEVHVQLHFTLN

SEQ ID NO: 1171 - protein, 138 aa, synthetic construct
GQKHTVDLTHHFHFRGNRVTEVRVHIRPLPGEEEAEALRAQRAERLGPSAIPEEQIRQFLRRFYEALDSGDADTAASLFHPGVTIHLWDGVTFTSREEFREWFERLFSTSKDAWREIKSLEVRGDTVEVHVQLHFTLN

SEQ ID NO: 1172 - protein, 138 aa, synthetic construct
GQKHTVDLTHHFHFRGNRVTEVRVHITPLPGEEEAEALRAQRAERLGPSAIPEEQIRQFLRRFYEALDSGDADTAASLFHPGVTIHLWDGVTFTSREEFREWFERLFSTSKDAWREIKSLEVRGDTVEVHVQLHFTLN

SEQ ID NO: 1173 - protein, 138 aa, synthetic construct
GQKHTVDLTHHFHFRGNRVTEVRVHITPLPGEEEAQALLAQRAERLEPSAIPEEQIRQFLRRFYEALDSGDADTAASLFHPGVTIHLWDGVTFTSREEFREWFERLFSTSKDAWREIKSLEVRGDTVEVHVQLHFTLN

SEQ ID NO: 1174 - protein, 138 aa, synthetic construct
GQKHTVDLTHHFHFRGNRVTEVRVHIRPLPGEEEAEALLAQRREVLGPSSIPEEQIRQFLRRFYEALDSGDADTAASLFHPGVTIHLWDGVTFTSREEFREWFERLFSTSKDAWREIKSLEVRGDTVEVHVQLHFTLN

SEQ ID NO: 1175 - protein, 138 aa, synthetic construct
GQKHTVDLTHHFHFRGNRVTEVRVHIRPLPGEEEAQRLLAQRRERLEPSAIPEEQIRQFLRRFYEALDSGDADTAASLFHPGVTIHLWDGVTFTSREEFREWFERLFSTSKDAWREIKSLEVRGDTVEVHVQLHFTLN

SEQ ID NO: 1176 - protein, 138 aa, synthetic construct
GQKHTVDLTHHFHFRGNRVTEVRVHITPLPGEAEAEALRAQRAERLEPSAIPEEQIRQFLRRFYEALDSGDADTAASLFHPGVTIHLWDGVTFTSREEFREWFERLFSTSKDAWREIKSLEVRGDTVEVHVQLHFTLN

SEQ ID NO: 1177 - protein, 139 aa, synthetic construct
GQKHTVDLTHHFHFRGNRVTEVRVHINPTVDDEEAAERLRELRRERFSPDVMSEEQIRQFLRRFYEALDSGDADTAASLFHPGVTIHLWDGVTFTSREEFREWFERLFSTSKDAWREIKSLEVRGDTVEVHVQLHFTLN

SEQ ID NO: 1178 - protein, 139 aa, synthetic construct
GQKHTVDLTHHFHFRGNRVTEVRVHIHPLPSEEEAERLRAQRREAFSPDSPVSEEQIRQFLRRFYEALDSGDADTAASLFHPGVTIHLWDGVTFTSREEFREWFERLFSTSKDAWREIKSLEVRGDTVEVHVQLHFTLN

SEQ ID NO: 1179 - protein, 139 aa, synthetic construct
GQKHTVDLTHHFHFRGNRVTEVRVHITPLASEEEAEALLAQRREAFSPDCPISEEQIRQFLRRFYEALDSGDADTAASLFHPGVTIHLWDGVTFTSREEFREWFERLFSTSKDAWREIKSLEVRGDTVEVHVQLHFTLN

SEQ ID NO: 1180 - protein, 139 aa, synthetic construct
GQKHTVDLTHHFHFRGNRVTEVRVHITPLASEEEAEALRAQRSERFSPDCPVSEEQIRQFLRRFYEALDSGDADTAASLFHPGVTIHLWDGVTFTSREEFREWFERLFSTSKDAWREIKSLEVRGDTVEVHVQLHFTLN

SEQ ID NO: 1181 - protein, 139 aa, synthetic construct
GQKHTVDLTHHFHFRGNRVTEVRVHITPLASEAEAEALRAQRSERVSPDVPVSEEQIRQFLRRFYEALDSGDADTAASLFHPGVTIHLWDGVTFTSREEFREWFERLFSTSKDAWREIKSLEVRGDTVEVHVQLHFTLN

SEQ ID NO: 1182 - protein, 139 aa, synthetic construct
GQKHTVDLTHHFHFRGNRVTEVRVHITPLASEEEAEALRAQRSERVSPDVPVPEEQIRQFLRRFYEALDSGDADTAASLFHPGVTIHLWDGVTFTSREEFREWFERLFSTSKDAWREIKSLEVRGDTVEVHVQLHFTLN

SEQ ID NO: 1183 - protein, 139 aa, synthetic construct
GQKHTVDLTHHFHFRGNRVTEVRVHITPLASEAEAEALLAQRRERVSPDVPVSEEQIRQFLRRFYEALDSGDADTAASLFHPGVTIHLWDGVTFTSREEFREWFERLFSTSKDAWREIKSLEVRGDTVEVHVQLHFTLN

SEQ ID NO: 1184 - protein, 139 aa, synthetic construct
GQKHTVDLTHHFHFRGNRVTEVRVHITPLASEEEAEELLAQRRERVSPDVPPSEEQIRQFLRRFYEALDSGDADTAASLFHPGVTIHLWDGVTFTSREEFREWFERLFSTSKDAWREIKSLEVRGDTVEVHVQLHFTLN

SEQ ID NO: 1185 - protein, 139 aa, synthetic construct
GQKHTVDLTHHFHFRGNRVTEVRVHIHPLPSEEEAQALLAERREAFSPDCPVPEEQIRQFLRRFYEALDSGDADTAASLFHPGVTIHLWDGVTFTSREEFREWFERLFSTSKDAWREIKSLEVRGDTVEVHVQLHFTLN

SEQ ID NO: 1186 - protein, 139 aa, synthetic construct
GQKHTVDLTHHFHFRGNRVTEVRVHITPLPSEAEAEALLAQRREAFSPDCPVSEEQIRQFLRRFYEALDSGDADTAASLFHPGVTIHLWDGVTFTSREEFREWFERLFSTSKDAWREIKSLEVRGDTVEVHVQLHFTLN

SEQ ID NO: 1187 - protein, 139 aa, synthetic construct
GQKHTVDLTHHFHFRGNRVTEVRVHITPLASEEEAEALRAQRRERVSPDVPPSEEQIRQFLRRFYEALDSGDADTAASLFHPGVTIHLWDGVTFTSREEFREWFERLFSTSKDAWREIKSLEVRGDTVEVHVQLHFTLN

SEQ ID NO: 1188 - protein, 139 aa, synthetic construct
GQKHTVDLTHHFHFRGNRVTEVRVHIHPLPSEEEAQALLAQRRERVSPDVPISEEQIRQFLRRFYEALDSGDADTAASLFHPGVTIHLWDGVTFTSREEFREWFERLFSTSKDAWREIKSLEVRGDTVEVHVQLHFTLN

SEQ ID NO: 1189 - protein, 139 aa, synthetic construct
GQKHTVDLTHHFHFRGNRVTEVRVHITPLSSEAEAEALLAQRREAVSPDVPVSEEQIRQFLRRFYEALDSGDADTAASLFHPGVTIHLWDGVTFTSREEFREWFERLFSTSKDAWREIKSLEVRGDTVEVHVQLHFTLN

SEQ ID NO: 1190 - protein, 139 aa, synthetic construct
GQKHTVDLTHHFHFRGNRVTEVRVHITPLPSEEEAEALLAQRREAVSPDVPVSEEQIRQFLRRFYEALDSGDADTAASLFHPGVTIHLWDGVTFTSREEFREWFERLFSTSKDAWREIKSLEVRGDTVEVHVQLHFTLN

SEQ ID NO: 1191 - protein, 139 aa, synthetic construct
GQKHTVDLTHHFHFRGNRVTEVRVHITPLASEEEAQALLAQRREAFSPDCPVSEEQIRQFLRRFYEALDSGDADTAASLFHPGVTIHLWDGVTFTSREEFREWFERLFSTSKDAWREIKSLEVRGDTVEVHVQLHFTLN

SEQ ID NO: 1192 - protein, 139 aa, synthetic construct
GQKHTVDLTHHFHFRGNRVTEVRVHITPLASEAEAQELLAQRSERFSPDCPIPEEQIRQFLRRFYEALDSGDADTAASLFHPGVTIHLWDGVTFTSREEFREWFERLFSTSKDAWREIKSLEVRGDTVEVHVQLHFTLN

SEQ ID NO: 1193 - protein, 139 aa, synthetic construct
GQKHTVDLTHHFHFRGNRVTEVRVHIHPLASEEEAEALLAQRREAVSPDVPVSEEQIRQFLRRFYEALDSGDADTAASLFHPGVTIHLWDGVTFTSREEFREWFERLFSTSKDAWREIKSLEVRGDTVEVHVQLHFTLN

SEQ ID NO: 1194 - protein, 139 aa, synthetic construct
GQKHTVDLTHHFHFRGNRVTEVRVHIHPLASEAEAEALRAQRREAFSPDCPVSEEQIRQFLRRFYEALDSGDADTAASLFHPGVTIHLWDGVTFTSREEFREWFERLFSTSKDAWREIKSLEVRGDTVEVHVQLHFTLN

SEQ ID NO: 1195 - protein, 139 aa, synthetic construct
GQKHTVDLTHHFHFRGNRVTEVRVHITPLPSEEEAEARLAQRREAVSPDVPVPEEQIRQFLRRFYEALDSGDADTAASLFHPGVTIHLWDGVTFTSREEFREWFERLFSTSKDAWREIKSLEVRGDTVEVHVQLHFTLN

SEQ ID NO: 1196 - protein, 139 aa, synthetic construct
GQKHTVDLTHHFHFRGNRVTEVRVHITPLPSEEEAQRLLAERRERFSPDCPISEEQIRQFLRRFYEALDSGDADTAASLFHPGVTIHLWDGVTFTSREEFREWFERLFSTSKDAWREIKSLEVRGDTVEVHVQLHFTLN

SEQ ID NO: 1197 - protein, 139 aa, synthetic construct
GQKHTVDLTHHFHFRGNRVTEVRVHITPLASEEEAQELLAQRRERFSPDCPVSEEQIRQFLRRFYEALDSGDADTAASLFHPGVTIHLWDGVTFTSREEFREWFERLFSTSKDAWREIKSLEVRGDTVEVHVQLHFTLN

SEQ ID NO: 1198 - protein, 140 aa, synthetic construct
GQKHTVDLTHHFHFRGNRVTEVRVHINPTVDDEEEAERLREALPEVEVGGPPMSEEQIRQFLRRFYEALDSGDADTAASLFHPGVTIHLWDGVTFTSREEFREWFERLFSTSKDAWREIKSLEVRGDTVEVHVQLHFTLN

SEQ ID NO: 1199 - protein, 140 aa, synthetic construct
GQKHTVDLTHHFHFRGNRVTEVRVHITPLASEAEAEALAAAHPPRLTGTPGSIPEEQIRQFLRRFYEALDSGDADTAASLFHPGVTIHLWDGVTFTSREEFREWFERLFSTSKDAWREIKSLEVRGDTVEVHVQLHFTLN

SEQ ID NO: 1200 - protein, 140 aa, synthetic construct
GQKHTVDLTHHFHFRGNRVTEVRVHIRELASEAEAEALAEAHPPRLTGTPGSIPEEQIRQFLRRFYEALDSGDADTAASLFHPGVTIHLWDGVTFTSREEFREWFERLFSTSKDAWREIKSLEVRGDTVEVHVQLHFTLN

SEQ ID NO: 1201 - protein, 140 aa, synthetic construct
GQKHTVDLTHHFHFRGNRVTEVRVHITPLASEAEAEALAAARPPRLTGTPGSIPEEQIRQFLRRFYEALDSGDADTAASLFHPGVTIHLWDGVTFTSREEFREWFERLFSTSKDAWREIKSLEVRGDTVEVHVQLHFTLN

SEQ ID NO: 1202 - protein, 140 aa, synthetic construct
GQKHTVDLTHHFHFRGNRVTEVRVHITELESEAEAEALAEAHPPRLTGTPGSIPEEQIRQFLRRFYEALDSGDADTAASLFHPGVTIHLWDGVTFTSREEFREWFERLFSTSKDAWREIKSLEVRGDTVEVHVQLHFTLN

SEQ ID NO: 1203 - protein, 140 aa, synthetic construct
GQKHTVDLTHHFHFRGNRVTEVRVHIRELASEEEAEALAAEHPPRLTGTPGSIPEEQIRQFLRRFYEALDSGDADTAASLFHPGVTIHLWDGVTFTSREEFREWFERLFSTSKDAWREIKSLEVRGDTVEVHVQLHFTLN

SEQ ID NO: 1204 - protein, 140 aa, synthetic construct
GQKHTVDLTHHFHFRGNRVTEVRVHITPLASEAEAAALAAAHPPRLTGTPGSIPEEQIRQFLRRFYEALDSGDADTAASLFHPGVTIHLWDGVTFTSREEFREWFERLFSTSKDAWREIKSLEVRGDTVEVHVQLHFTLN

SEQ ID NO: 1205 - protein, 140 aa, synthetic construct
GQKHTVDLTHHFHFRGNRVTEVRVHITPLASEEEAAALAAAHPPRLTGTPGSIPEEQIRQFLRRFYEALDSGDADTAASLFHPGVTIHLWDGVTFTSREEFREWFERLFSTSKDAWREIKSLEVRGDTVEVHVQLHFTLN

SEQ ID NO: 1206 - protein, 140 aa, synthetic construct
GQKHTVDLTHHFHFRGNRVTEVRVHITELESEEQAEALAAAHPPRLTGTPGTIPEEQIRQFLRRFYEALDSGDADTAASLFHPGVTIHLWDGVTFTSREEFREWFERLFSTSKDAWREIKSLEVRGDTVEVHVQLHFTLN

SEQ ID NO: 1207 - protein, 140 aa, synthetic construct
GQKHTVDLTHHFHFRGNRVTEVRVHITPLASEEEAEALAAARPPRLTGTPGSIPEEQIRQFLRRFYEALDSGDADTAASLFHPGVTIHLWDGVTFTSREEFREWFERLFSTSKDAWREIKSLEVRGDTVEVHVQLHFTLN

SEQ ID NO: 1208 - protein, 140 aa, synthetic construct
GQKHTVDLTHHFHFRGNRVTEVRVHIRELASEAEAAALAAAHPPRLTGTPGSIPEEQIRQFLRRFYEALDSGDADTAASLFHPGVTIHLWDGVTFTSREEFREWFERLFSTSKDAWREIKSLEVRGDTVEVHVQLHFTLN

SEQ ID NO: 1209 - protein, 140 aa, synthetic construct
GQKHTVDLTHHFHFRGNRVTEVRVHITELESEEEAAALAAARPPRLTGTPGSIPEEQIRQFLRRFYEALDSGDADTAASLFHPGVTIHLWDGVTFTSREEFREWFERLFSTSKDAWREIKSLEVRGDTVEVHVQLHFTLN

SEQ ID NO: 1210 - protein, 140 aa, synthetic construct
GQKHTVDLTHHFHFRGNRVTEVRVHITELASEAEAEALAAAHPPRLTGTPGSIPEEQIRQFLRRFYEALDSGDADTAASLFHPGVTIHLWDGVTFTSREEFREWFERLFSTSKDAWREIKSLEVRGDTVEVHVQLHFTLN

SEQ ID NO: 1211 - protein, 140 aa, synthetic construct
GQKHTVDLTHHFHFRGNRVTEVRVHITELESEEEAEALAAAHPPRLTGTPGSIPEEQIRQFLRRFYEALDSGDADTAASLFHPGVTIHLWDGVTFTSREEFREWFERLFSTSKDAWREIKSLEVRGDTVEVHVQLHFTLN

SEQ ID NO: 1212 - protein, 140 aa, synthetic construct
GQKHTVDLTHHFHFRGNRVTEVRVHITPLASEAEAEALAEARPPRLTGTPGSIPEEQIRQFLRRFYEALDSGDADTAASLFHPGVTIHLWDGVTFTSREEFREWFERLFSTSKDAWREIKSLEVRGDTVEVHVQLHFTLN

SEQ ID NO: 1213 - protein, 141 aa, synthetic construct
GQKHTVDLTHHFHFRGNRVTEVRVHINPTVEDGRVLDPEELEELLEELLRAPPMSEEQIRQFLRRFYEALDSGDADTAASLFHPGVTIHLWDGVTFTSREEFREWFERLFSTSKDAWREIKSLEVRGDTVEVHVQLHFTLN

SEQ ID NO: 1214 - protein, 141 aa, synthetic construct
GQKHTVDLTHHFHFRGNRVTEVRVHIRDVATGADANPALAAEIRAALGQSEASLSEEQIRQFLRRFYEALDSGDADTAASLFHPGVTIHLWDGVTFTSREEFREWFERLFSTSKDAWREIKSLEVRGDTVEVHVQLHFTLN

SEQ ID NO: 1215 - protein, 141 aa, synthetic construct
GQKHTVDLTHHFHFRGNRVTEVRVHIHDVETGETANPELLAQIRAELGRAEASLSEEQIRQFLRRFYEALDSGDADTAASLFHPGVTIHLWDGVTFTSREEFREWFERLFSTSKDAWREIKSLEVRGDTVEVHVQLHFTLN

SEQ ID NO: 1216 - protein, 141 aa, synthetic construct
GQKHTVDLTHHFHFRGNRVTEVRVHIHDVETGTTANPELLEEIRRALGESEASLTEEQIRQFLRRFYEALDSGDADTAASLFHPGVTIHLWDGVTFTSREEFREWFERLFSTSKDAWREIKSLEVRGDTVEVHVQLHFTLN

SEQ ID NO: 1217 - protein, 141 aa, synthetic construct
GQKHTVDLTHHFHFRGNRVTEVRVHIHDVETGETANPELLEEIRAALHESEASLSEEQIRQFLRRFYEALDSGDADTAASLFHPGVTIHLWDGVTFTSREEFREWFERLFSTSKDAWREIKSLEVRGDTVEVHVQLHFTLN

SEQ ID NO: 1218 - protein, 141 aa, synthetic construct
GQKHTVDLTHHFHFRGNRVTEVRVHIHNVETGETANPALLAEIRAALGQSEASLSEEQIRQFLRRFYEALDSGDADTAASLFHPGVTIHLWDGVTFTSREEFREWFERLFSTSKDAWREIKSLEVRGDTVEVHVQLHFTLN

SEQ ID NO: 1219 - protein, 141 aa, synthetic construct
GQKHTVDLTHHFHFRGNRVTEVRVHIRDVETGTEANPELLAEIRAALGESEASLSEEQIRQFLRRFYEALDSGDADTAASLFHPGVTIHLWDGVTFTSREEFREWFERLFSTSKDAWREIKSLEVRGDTVEVHVQLHFTLN

SEQ ID NO: 1220 - protein, 141 aa, synthetic construct
GQKHTVDLTHHFHFRGNRVTEVRVHIHDVETGETANPELLAEIRAALGESEASLTEEQIRQFLRRFYEALDSGDADTAASLFHPGVTIHLWDGVTFTSREEFREWFERLFSTSKDAWREIKSLEVRGDTVEVHVQLHFTLN

SEQ ID NO: 1221 - protein, 141 aa, synthetic construct
GQKHTVDLTHHFHFRGNRVTEVRVHIHDVATGETANPELLAEIREALGRSEASLTEEQIRQFLRRFYEALDSGDADTAASLFHPGVTIHLWDGVTFTSREEFREWFERLFSTSKDAWREIKSLEVRGDTVEVHVQLHFTLN

SEQ ID NO: 1222 - protein, 141 aa, synthetic construct
GQKHTVDLTHHFHFRGNRVTEVRVHIHDVETGETANPELAAQIRAELGQSEASLTEEQIRQFLRRFYEALDSGDADTAASLFHPGVTIHLWDGVTFTSREEFREWFERLFSTSKDAWREIKSLEVRGDTVEVHVQLHFTLN

SEQ ID NO: 1223 - protein, 141 aa, synthetic construct
GQKHTVDLTHHFHFRGNRVTEVRVHIHDVETGETANPELAAEIRAELGRSAASLTEEQIRQFLRRFYEALDSGDADTAASLFHPGVTIHLWDGVTFTSREEFREWFERLFSTSKDAWREIKSLEVRGDTVEVHVQLHFTLN

SEQ ID NO: 1224 - protein, 141 aa, synthetic construct
GQKHTVDLTHHFHFRGNRVTEVRVHIHDVETGETANPELLAEIRAALGESGASLSEEQIRQFLRRFYEALDSGDADTAASLFHPGVTIHLWDGVTFTSREEFREWFERLFSTSKDAWREIKSLEVRGDTVEVHVQLHFTLN

SEQ ID NO: 1225 - protein, 141 aa, synthetic construct
GQKHTVDLTHHFHFRGNRVTEVRVHIHDVATGTTANPALLAEIRERLGQSEASLSEEQIRQFLRRFYEALDSGDADTAASLFHPGVTIHLWDGVTFTSREEFREWFERLFSTSKDAWREIKSLEVRGDTVEVHVQLHFTLN

SEQ ID NO: 1226 - protein, 141 aa, synthetic construct
GQKHTVDLTHHFHFRGNRVTEVRVHIHDVATGTTANPALLAEIREALGQSEASLTEEQIRQFLRRFYEALDSGDADTAASLFHPGVTIHLWDGVTFTSREEFREWFERLFSTSKDAWREIKSLEVRGDTVEVHVQLHFTLN

SEQ ID NO: 1227 - protein, 141 aa, synthetic construct
GQKHTVDLTHHFHFRGNRVTEVRVHIHDVETGETANPELLAQIRAELGRSEASLTEEQIRQFLRRFYEALDSGDADTAASLFHPGVTIHLWDGVTFTSREEFREWFERLFSTSKDAWREIKSLEVRGDTVEVHVQLHFTLN

SEQ ID NO: 1228 - protein, 141 aa, synthetic construct
GQKHTVDLTHHFHFRGNRVTEVRVHIHDVETGETANPALLEEIRAALGQSEASLSEEQIRQFLRRFYEALDSGDADTAASLFHPGVTIHLWDGVTFTSREEFREWFERLFSTSKDAWREIKSLEVRGDTVEVHVQLHFTLN

SEQ ID NO: 1229 - protein, 141 aa, synthetic construct
GQKHTVDLTHHFHFRGNRVTEVRVHIHDVETGETANPELLAQIRAELGQSGASLSEEQIRQFLRRFYEALDSGDADTAASLFHPGVTIHLWDGVTFTSREEFREWFERLFSTSKDAWREIKSLEVRGDTVEVHVQLHFTLN

SEQ ID NO: 1230 - protein, 141 aa, synthetic construct
GQKHTVDLTHHFHFRGNRVTEVRVHIHDVATGETANPELLAQIRAELHQSEASLSEEQIRQFLRRFYEALDSGDADTAASLFHPGVTIHLWDGVTFTSREEFREWFERLFSTSKDAWREIKSLEVRGDTVEVHVQLHFTLN

SEQ ID NO: 1231 - protein, 141 aa, synthetic construct
GQKHTVDLTHHFHFRGNRVTEVRVHIHDVATGTTANPELLAQIRAELGRSAASLTEEQIRQFLRRFYEALDSGDADTAASLFHPGVTIHLWDGVTFTSREEFREWFERLFSTSKDAWREIKSLEVRGDTVEVHVQLHFTLN

SEQ ID NO: 1232 - protein, 141 aa, synthetic construct
GQKHTVDLTHHFHFRGNRVTEVRVHIHDVATGETANPELLAQIRAELGRSEASLTEEQIRQFLRRFYEALDSGDADTAASLFHPGVTIHLWDGVTFTSREEFREWFERLFSTSKDAWREIKSLEVRGDTVEVHVQLHFTLN

SEQ ID NO: 1233 - protein, 141 aa, synthetic construct
GQKHTVDLTHHFHFRGNRVTEVRVHIHDVETGETANPELLAQIRAELGRSGASLSEEQIRQFLRRFYEALDSGDADTAASLFHPGVTIHLWDGVTFTSREEFREWFERLFSTSKDAWREIKSLEVRGDTVEVHVQLHFTLN

SEQ ID NO: 1234 - protein, 142 aa, synthetic construct
GQKHTVDLTHHFHFRGNRVTEVRVHINPTVDDGDLEELLLLLLELLLELLEAPPMSEEQIRQFLRRFYEALDSGDADTAASLFHPGVTIHLWDGVTFTSREEFREWFERLFSTSKDAWREIKSLEVRGDTVEVHVQLHFTLN

SEQ ID NO: 1235 - protein, 142 aa, synthetic construct
GQKHTVDLTHHFHFRGNRVTEVRVHIHEVKDGDAEERREALREEELARAASEASLTEEQIRQFLRRFYEALDSGDADTAASLFHPGVTIHLWDGVTFTSREEFREWFERLFSTSKDAWREIKSLEVRGDTVEVHVQLHFTLN

SEQ ID NO: 1236 - protein, 142 aa, synthetic construct
GQKHTVDLTHHFHFRGNRVTEVRVHIHPVTGGDAEARREALRAAELARAASEAELTEEQIRQFLRRFYEALDSGDADTAASLFHPGVTIHLWDGVTFTSREEFREWFERLFSTSKDAWREIKSLEVRGDTVEVHVQLHFTLN

SEQ ID NO: 1237 - protein, 142 aa, synthetic construct
GQKHTVDLTHHFHFRGNRVTEVRVHIHPVTDGDAEARRTALREELLATASSEASLSEEQIRQFLRRFYEALDSGDADTAASLFHPGVTIHLWDGVTFTSREEFREWFERLFSTSKDAWREIKSLEVRGDTVEVHVQLHFTLN

SEQ ID NO: 1238 - protein, 142 aa, synthetic construct
GQKHTVDLTHHFHFRGNRVTEVRVHIHEVTDGDAEERVEAERERVLATLESEPELTEEQIRQFLRRFYEALDSGDADTAASLFHPGVTIHLWDGVTFTSREEFREWFERLFSTSKDAWREIKSLEVRGDTVEVHVQLHFTLN

SEQ ID NO: 1239 - protein, 142 aa, synthetic construct
GQKHTVDLTHHFHFRGNRVTEVRVHIHEVTDGDAEARVQAAREAELARASSEASLSEEQIRQFLRRFYEALDSGDADTAASLFHPGVTIHLWDGVTFTSREEFREWFERLFSTSKDAWREIKSLEVRGDTVEVHVQLHFTLN

SEQ ID NO: 1240 - protein, 142 aa, synthetic construct
GQKHTVDLTHHFHFRGNRVTEVRVHIHEVTDGDAEARREALRAEVLATAESEAELSEEQIRQFLRRFYEALDSGDADTAASLFHPGVTIHLWDGVTFTSREEFREWFERLFSTSKDAWREIKSLEVRGDTVEVHVQLHFTLN

SEQ ID NO: 1241 - protein, 142 aa, synthetic construct
GQKHTVDLTHHFHFRGNRVTEVRVHIHEVTGGDAEERTERLRAETLATSESEASLTEEQIRQFLRRFYEALDSGDADTAASLFHPGVTIHLWDGVTFTSREEFREWFERLFSTSKDAWREIKSLEVRGDTVEVHVQLHFTLN

SEQ ID NO: 1242 - protein, 142 aa, synthetic construct
GQKHTVDLTHHFHFRGNRVTEVRVHIHEVTDGDAEARREAAREARLAEASSEAELTEEQIRQFLRRFYEALDSGDADTAASLFHPGVTIHLWDGVTFTSREEFREWFERLFSTSKDAWREIKSLEVRGDTVEVHVQLHFTLN

SEQ ID NO: 1243 - protein, 142 aa, synthetic construct
GQKHTVDLTHHFHFRGNRVTEVRVHIHEVTGGDREARVEALREAVLAEAESEPELSEEQIRQFLRRFYEALDSGDADTAASLFHPGVTIHLWDGVTFTSREEFREWFERLFSTSKDAWREIKSLEVRGDTVEVHVQLHFTLN

SEQ ID NO: 1244 - protein, 142 aa, synthetic construct
GQKHTVDLTHHFHFRGNRVTEVRVHIHDVTGGDAEAKTQAAREEVLATASSEASLTEEQIRQFLRRFYEALDSGDADTAASLFHPGVTIHLWDGVTFTSREEFREWFERLFSTSKDAWREIKSLEVRGDTVEVHVQLHFTLN

SEQ ID NO: 1245 - protein, 142 aa, synthetic construct
GQKHTVDLTHHFHFRGNRVTEVRVHIHPVTDGDAEARREALRAEVLATASSAAELTEEQIRQFLRRFYEALDSGDADTAASLFHPGVTIHLWDGVTFTSREEFREWFERLFSTSKDAWREIKSLEVRGDTVEVHVQLHFTLN

SEQ ID NO: 1246 - protein, 142 aa, synthetic construct
GQKHTVDLTHHFHFRGNRVTEVRVHIHEVKDGDAEARREALRAAVLATMSSAPELTEEQIRQFLRRFYEALDSGDADTAASLFHPGVTIHLWDGVTFTSREEFREWFERLFSTSKDAWREIKSLEVRGDTVEVHVQLHFTLN

SEQ ID NO: 1247 - protein, 142 aa, synthetic construct
GQKHTVDLTHHFHFRGNRVTEVRVHIHEVTGGDAEERREALRAEVLATLSSPAELSEEQIRQFLRRFYEALDSGDADTAASLFHPGVTIHLWDGVTFTSREEFREWFERLFSTSKDAWREIKSLEVRGDTVEVHVQLHFTLN

SEQ ID NO: 1248 - protein, 142 aa, synthetic construct
GQKHTVDLTHHFHFRGNRVTEVRVHIHEVKDGNAEAQREALREEVLATAESEAELSEEQIRQFLRRFYEALDSGDADTAASLFHPGVTIHLWDGVTFTSREEFREWFERLFSTSKDAWREIKSLEVRGDTVEVHVQLHFTLN

SEQ ID NO: 1249 - protein, 142 aa, synthetic construct
GQKHTVDLTHHFHFRGNRVTEVRVHIHEVKDGDAEARTAAARAAALATAESEASLSEEQIRQFLRRFYEALDSGDADTAASLFHPGVTIHLWDGVTFTSREEFREWFERLFSTSKDAWREIKSLEVRGDTVEVHVQLHFTLN

SEQ ID NO: 1250 - protein, 142 aa, synthetic construct
GQKHTVDLTHHFHFRGNRVTEVRVHIHEVTDGDEEERVTAAREEVLATASSEAELTEEQIRQFLRRFYEALDSGDADTAASLFHPGVTIHLWDGVTFTSREEFREWFERLFSTSKDAWREIKSLEVRGDTVEVHVQLHFTLN

SEQ ID NO: 1251 - protein, 142 aa, synthetic construct
GQKHTVDLTHHFHFRGNRVTEVRVHIHEVTGGDAEARRQAAFEAELAKMSSAPELSEEQIRQFLRRFYEALDSGDADTAASLFHPGVTIHLWDGVTFTSREEFREWFERLFSTSKDAWREIKSLEVRGDTVEVHVQLHFTLN

SEQ ID NO: 1252 - protein, 142 aa, synthetic construct
GQKHTVDLTHHFHFRGNRVTEVRVHIHEVKDGNEEELTERLRREVLATLESEPELTEEQIRQFLRRFYEALDSGDADTAASLFHPGVTIHLWDGVTFTSREEFREWFERLFSTSKDAWREIKSLEVRGDTVEVHVQLHFTLN

SEQ ID NO: 1253 - protein, 142 aa, synthetic construct
GQKHTVDLTHHFHFRGNRVTEVRVHIFEVKDGDAEARVEAARAAALAEAASEAELSEEQIRQFLRRFYEALDSGDADTAASLFHPGVTIHLWDGVTFTSREEFREWFERLFSTSKDAWREIKSLEVRGDTVEVHVQLHFTLN

SEQ ID NO: 1254 - protein, 142 aa, synthetic construct
GQKHTVDLTHHFHFRGNRVTEVRVHIHEVTDGDAEARREAARAEVLATSSSAAELSEEQIRQFLRRFYEALDSGDADTAASLFHPGVTIHLWDGVTFTSREEFREWFERLFSTSKDAWREIKSLEVRGDTVEVHVQLHFTLN

SEQ ID NO: 1255 - protein, 143 aa, synthetic construct
GQKHTVDLTHHFHFRGNRVTEVRVHINPTVDGGELLELLLELLLELLEELLGPPPMSEEQIRQFLRRFYEALDSGDADTAASLFHPGVTIHLWDGVTFTSREEFREWFERLFSTSKDAWREIKSLEVRGDTVEVHVQLHFTLN

SEQ ID NO: 1256 - protein, 143 aa, synthetic construct
GQKHTVDLTHHFHFRGNRVTEVRVHIVEDTGGEREAAVAALREAALAEAGGRPAELTEEQIRQFLRRFYEALDSGDADTAASLFHPGVTIHLWDGVTFTSREEFREWFERLFSTSKDAWREIKSLEVRGDTVEVHVQLHFTLN

SEQ ID NO: 1257 - protein, 143 aa, synthetic construct
GQKHTVDLTHHFHFRGNRVTEVRVHIVEDTGGEREAAVAALREAALAEAGGPPAELTEEQIRQFLRRFYEALDSGDADTAASLFHPGVTIHLWDGVTFTSREEFREWFERLFSTSKDAWREIKSLEVRGDTVEVHVQLHFTLN

SEQ ID NO: 1258 - protein, 143 aa, synthetic construct
GQKHTVDLTHHFHFRGNRVTEVRVHIVEDTGGEREEAVQALREAARAEMGGRPAELTEEQIRQFLRRFYEALDSGDADTAASLFHPGVTIHLWDGVTFTSREEFREWFERLFSTSKDAWREIKSLEVRGDTVEVHVQLHFTLN

SEQ ID NO: 1259 - protein, 143 aa, synthetic construct
GQKHTVDLTHHFHFRGNRVTEVRVHIVERTGGSHDAAVQALRDAARAAAGGRPAELTEEQIRQFLRRFYEALDSGDADTAASLFHPGVTIHLWDGVTFTSREEFREWFERLFSTSKDAWREIKSLEVRGDTVEVHVQLHFTLN

SEQ ID NO: 1260 - protein, 143 aa, synthetic construct
GQKHTVDLTHHFHFRGNRVTEVRVHIVEDTGGEREEKVAALREAALAAAGGPPAELTEEQIRQFLRRFYEALDSGDADTAASLFHPGVTIHLWDGVTFTSREEFREWFERLFSTSKDAWREIKSLEVRGDTVEVHVQLHFTLN

SEQ ID NO: 1261 - protein, 143 aa, synthetic construct
GQKHTVDLTHHFHFRGNRVTEVRVHIVERTGGSYEEEVQALREEALAAAGGRPATLTEEQIRQFLRRFYEALDSGDADTAASLFHPGVTIHLWDGVTFTSREEFREWFERLFSTSKDAWREIKSLEVRGDTVEVHVQLHFTLN

SEQ ID NO: 1262 - protein, 143 aa, synthetic construct
GQKHTVDLTHHFHFRGNRVTEVRVHIVERTGGSHEAEVAALREAARAAAGGPPATLTEEQIRQFLRRFYEALDSGDADTAASLFHPGVTIHLWDGVTFTSREEFREWFERLFSTSKDAWREIKSLEVRGDTVEVHVQLHFTLN

SEQ ID NO: 1263 - protein, 143 aa, synthetic construct
GQKHTVDLTHHFHFRGNRVTEVRVHIVEDTGGEREERVRALREAARAAAGGRPASLTEEQIRQFLRRFYEALDSGDADTAASLFHPGVTIHLWDGVTFTSREEFREWFERLFSTSKDAWREIKSLEVRGDTVEVHVQLHFTLN

SEQ ID NO: 1264 - protein, 143 aa, synthetic construct
GQKHTVDLTHHFHFRGNRVTEVRVHIVEDTGGSREAEVEALRAERLAEAGGRPASLTEEQIRQFLRRFYEALDSGDADTAASLFHPGVTIHLWDGVTFTSREEFREWFERLFSTSKDAWREIKSLEVRGDTVEVHVQLHFTLN

SEQ ID NO: 1265 - protein, 143 aa, synthetic construct
GQKHTVDLTHHFHFRGNRVTEVRVHIVEDTGGEREEAVQALREEALAAAGGRPATLTEEQIRQFLRRFYEALDSGDADTAASLFHPGVTIHLWDGVTFTSREEFREWFERLFSTSKDAWREIKSLEVRGDTVEVHVQLHFTLN

SEQ ID NO: 1266 - protein, 143 aa, synthetic construct
GQKHTVDLTHHFHFRGNRVTEVRVHIVEDTGGEREAAVQALREARLAEAGGRPASLTEEQIRQFLRRFYEALDSGDADTAASLFHPGVTIHLWDGVTFTSREEFREWFERLFSTSKDAWREIKSLEVRGDTVEVHVQLHFTLN

SEQ ID NO: 1267 - protein, 143 aa, synthetic construct
GQKHTVDLTHHFHFRGNRVTEVRVHIVERTGGSHEPEVEALREEALARAGGRPAELTEEQIRQFLRRFYEALDSGDADTAASLFHPGVTIHLWDGVTFTSREEFREWFERLFSTSKDAWREIKSLEVRGDTVEVHVQLHFTLN

SEQ ID NO: 1268 - protein, 143 aa, synthetic construct
GQKHTVDLTHHFHFRGNRVTEVRVHIVEDTGGEREAAVEALRQEALAASGGPPAELTEEQIRQFLRRFYEALDSGDADTAASLFHPGVTIHLWDGVTFTSREEFREWFERLFSTSKDAWREIKSLEVRGDTVEVHVQLHFTLN

SEQ ID NO: 1269 - protein, 143 aa, synthetic construct
GQKHTVDLTHHFHFRGNRVTEVRVHIVEDTGGEREERVEALREAARAAAGGRPASLTEEQIRQFLRRFYEALDSGDADTAASLFHPGVTIHLWDGVTFTSREEFREWFERLFSTSKDAWREIKSLEVRGDTVEVHVQLHFTLN

SEQ ID NO: 1270 - protein, 143 aa, synthetic construct
GQKHTVDLTHHFHFRGNRVTEVRVHIVEDTGGEREAAVEALRAAALAEAGGRPATLTEEQIRQFLRRFYEALDSGDADTAASLFHPGVTIHLWDGVTFTSREEFREWFERLFSTSKDAWREIKSLEVRGDTVEVHVQLHFTLN

SEQ ID NO: 1271 - protein, 143 aa, synthetic construct
GQKHTVDLTHHFHFRGNRVTEVRVHIVERTGGEYEARVEALREAARAAAGGRPASLTEEQIRQFLRRFYEALDSGDADTAASLFHPGVTIHLWDGVTFTSREEFREWFERLFSTSKDAWREIKSLEVRGDTVEVHVQLHFTLN

SEQ ID NO: 1272 - protein, 143 aa, synthetic construct
GQKHTVDLTHHFHFRGNRVTEVRVHIVEDDGGEREARVEALVAAARAEAGGPPASLTEEQIRQFLRRFYEALDSGDADTAASLFHPGVTIHLWDGVTFTSREEFREWFERLFSTSKDAWREIKSLEVRGDTVEVHVQLHFTLN

SEQ ID NO: 1273 - protein, 143 aa, synthetic construct
GQKHTVDLTHHFHFRGNRVTEVRVHIVEDTGGEREEAVEALRAAARAEAGGRPATLTEEQIRQFLRRFYEALDSGDADTAASLFHPGVTIHLWDGVTFTSREEFREWFERLFSTSKDAWREIKSLEVRGDTVEVHVQLHFTLN

SEQ ID NO: 1274 - protein, 143 aa, synthetic construct
GQKHTVDLTHHFHFRGNRVTEVRVHIVERTGGEHEAAVRALVEEARAAAGGPPASLTEEQIRQFLRRFYEALDSGDADTAASLFHPGVTIHLWDGVTFTSREEFREWFERLFSTSKDAWREIKSLEVRGDTVEVHVQLHFTLN

SEQ ID NO: 1275 - protein, 143 aa, synthetic construct
GQKHTVDLTHHFHFRGNRVTEVRVHIVERTGGEHEAAVQALRDAALARAGGRPASLTEEQIRQFLRRFYEALDSGDADTAASLFHPGVTIHLWDGVTFTSREEFREWFERLFSTSKDAWREIKSLEVRGDTVEVHVQLHFTLN

SEQ ID NO: 1276 - protein, 144 aa, synthetic construct
GQKHTVDLTHHFHFRGNRVTEVRVHINPTVDEEELLELLLLLLLLLLLELLAGGPPMSEEQIRQFLRRFYEALDSGDADTAASLFHPGVTIHLWDGVTFTSREEFREWFERLFSTSKDAWREIKSLEVRGDTVEVHVQLHFTLN

SEQ ID NO: 1277 - protein, 144 aa, synthetic construct
GQKHTVDLTHHFHFRGNRVTEVRVHIRPVPGEGGAEEILEELLAEARARMGGGGAEISEEQIRQFLRRFYEALDSGDADTAASLFHPGVTIHLWDGVTFTSREEFREWFERLFSTSKDAWREIKSLEVRGDTVEVHVQLHFTLN

SEQ ID NO: 1278 - protein, 144 aa, synthetic construct
GQKHTVDLTHHFHFRGNRVTEVRVHIRPVPGEGGSEEILEELFEEARARMGGGGAEISEEQIRQFLRRFYEALDSGDADTAASLFHPGVTIHLWDGVTFTSREEFREWFERLFSTSKDAWREIKSLEVRGDTVEVHVQLHFTLN

SEQ ID NO: 1279 - protein, 144 aa, synthetic construct
GQKHTVDLTHHFHFRGNRVTEVRVHIRPVPGEGGAEEILAELREEARARMGGGGAEISEEQIRQFLRRFYEALDSGDADTAASLFHPGVTIHLWDGVTFTSREEFREWFERLFSTSKDAWREIKSLEVRGDTVEVHVQLHFTLN

SEQ ID NO: 1280 - protein, 144 aa, synthetic construct
GQKHTVDLTHHFHFRGNRVTEVRVHIRPVPGSGGREAILEELLEEARARMGGGGAEISEEQIRQFLRRFYEALDSGDADTAASLFHPGVTIHLWDGVTFTSREEFREWFERLFSTSKDAWREIKSLEVRGDTVEVHVQLHFTLN

SEQ ID NO: 1281 - protein, 144 aa, synthetic construct
GQKHTVDLTHHFHFRGNRVTEVRVHIRPVPGSGGAEAILEELLAEARARMGGGGAEISEEQIRQFLRRFYEALDSGDADTAASLFHPGVTIHLWDGVTFTSREEFREWFERLFSTSKDAWREIKSLEVRGDTVEVHVQLHFTLN

SEQ ID NO: 1282 - protein, 144 aa, synthetic construct
GQKHTVDLTHHFHFRGNRVTEVRVHIRPVPGSGGSEEILEELREEARAAMGGGGAEISEEQIRQFLRRFYEALDSGDADTAASLFHPGVTIHLWDGVTFTSREEFREWFERLFSTSKDAWREIKSLEVRGDTVEVHVQLHFTLN

SEQ ID NO: 1283 - protein, 144 aa, synthetic construct
GQKHTVDLTHHFHFRGNRVTEVRVHIRPVPGSGGAEERLAELLEEARARMGGGGAEISEEQIRQFLRRFYEALDSGDADTAASLFHPGVTIHLWDGVTFTSREEFREWFERLFSTSKDAWREIKSLEVRGDTVEVHVQLHFTLN

SEQ ID NO: 1284 - protein, 144 aa, synthetic construct
GQKHTVDLTHHFHFRGNRVTEVRVHIRPVPGSGGSEAILEELRAEALARMGGGGAEISEEQIRQFLRRFYEALDSGDADTAASLFHPGVTIHLWDGVTFTSREEFREWFERLFSTSKDAWREIKSLEVRGDTVEVHVQLHFTLN

SEQ ID NO: 1285 - protein, 144 aa, synthetic construct
GQKHTVDLTHHFHFRGNRVTEVRVHIRPVPGEGGAEEIQAELLEEARARMGGGGAEISEEQIRQFLRRFYEALDSGDADTAASLFHPGVTIHLWDGVTFTSREEFREWFERLFSTSKDAWREIKSLEVRGDTVEVHVQLHFTLN

SEQ ID NO: 1286 - protein, 144 aa, synthetic construct
GQKHTVDLTHHFHFRGNRVTEVRVHIEPVPGEGGAEAILERLRAEALARMGGGGAEISEEQIRQFLRRFYEALDSGDADTAASLFHPGVTIHLWDGVTFTSREEFREWFERLFSTSKDAWREIKSLEVRGDTVEVHVQLHFTLN

SEQ ID NO: 1287 - protein, 144 aa, synthetic construct
GQKHTVDLTHHFHFRGNRVTEVRVHIRPVPGEGGREAILAELREEALARMGGGGAEISEEQIRQFLRRFYEALDSGDADTAASLFHPGVTIHLWDGVTFTSREEFREWFERLFSTSKDAWREIKSLEVRGDTVEVHVQLHFTLN

SEQ ID NO: 1288 - protein, 144 aa, synthetic construct
GQKHTVDLTHHFHFRGNRVTEVRVHIRPVPGEGGSEAILEELREEARARMGGGGAEISEEQIRQFLRRFYEALDSGDADTAASLFHPGVTIHLWDGVTFTSREEFREWFERLFSTSKDAWREIKSLEVRGDTVEVHVQLHFTLN

SEQ ID NO: 1289 - protein, 144 aa, synthetic construct
GQKHTVDLTHHFHFRGNRVTEVRVHIRPVPGSGGSDAILEELLAEERARMGGGGAEISEEQIRQFLRRFYEALDSGDADTAASLFHPGVTIHLWDGVTFTSREEFREWFERLFSTSKDAWREIKSLEVRGDTVEVHVQLHFTLN

SEQ ID NO: 1290 - protein, 144 aa, synthetic construct
GQKHTVDLTHHFHFRGNRVTEVRVHIRPVPGSGGSEAILEELFAEARARMGGGGAEISEEQIRQFLRRFYEALDSGDADTAASLFHPGVTIHLWDGVTFTSREEFREWFERLFSTSKDAWREIKSLEVRGDTVEVHVQLHFTLN

SEQ ID NO: 1291 - protein, 144 aa, synthetic construct
GQKHTVDLTHHFHFRGNRVTEVRVHIRPVPGEGGAEEILAELFEEARARMGGGGAEISEEQIRQFLRRFYEALDSGDADTAASLFHPGVTIHLWDGVTFTSREEFREWFERLFSTSKDAWREIKSLEVRGDTVEVHVQLHFTLN

SEQ ID NO: 1292 - protein, 144 aa, synthetic construct
GQKHTVDLTHHFHFRGNRVTEVRVHIRPVPGEGGADEIQAELLAEARARMGGGGAEISEEQIRQFLRRFYEALDSGDADTAASLFHPGVTIHLWDGVTFTSREEFREWFERLFSTSKDAWREIKSLEVRGDTVEVHVQLHFTLN

SEQ ID NO: 1293 - protein, 144 aa, synthetic construct
GQKHTVDLTHHFHFRGNRVTEVRVHIRPVEGEGGAEEILEELRAEALARMGGGGAEISEEQIRQFLRRFYEALDSGDADTAASLFHPGVTIHLWDGVTFTSREEFREWFERLFSTSKDAWREIKSLEVRGDTVEVHVQLHFTLN

SEQ ID NO: 1294 - protein, 144 aa, synthetic construct
GQKHTVDLTHHFHFRGNRVTEVRVHIRPVPGSGGAEEIQAALLEEARARMGGGGAEISEEQIRQFLRRFYEALDSGDADTAASLFHPGVTIHLWDGVTFTSREEFREWFERLFSTSKDAWREIKSLEVRGDTVEVHVQLHFTLN

SEQ ID NO: 1295 - protein, 144 aa, synthetic construct
GQKHTVDLTHHFHFRGNRVTEVRVHIRPVPGSGGSEAILEELFEEARARMGGGGAEISEEQIRQFLRRFYEALDSGDADTAASLFHPGVTIHLWDGVTFTSREEFREWFERLFSTSKDAWREIKSLEVRGDTVEVHVQLHFTLN

SEQ ID NO: 1296 - protein, 144 aa, synthetic construct
GQKHTVDLTHHFHFRGNRVTEVRVHIRPVPGSGGSEAIQEELLEEARARMGGGGAEISEEQIRQFLRRFYEALDSGDADTAASLFHPGVTIHLWDGVTFTSREEFREWFERLFSTSKDAWREIKSLEVRGDTVEVHVQLHFTLN

SEQ ID NO: 1297 - protein, 145 aa, synthetic construct
GQKHTVDLTHHFHFRGNRVTEVRVHINPTVDEGDLEEALERALELAEEFAEELRGPPMSEEQIRQFLRRFYEALDSGDADTAASLFHPGVTIHLWDGVTFTSREEFREWFERLFSTSKDAWREIKSLEVRGDTVEVHVQLHFTLN

SEQ ID NO: 1298 - protein, 145 aa, synthetic construct
GQKHTVDLTHHFHFRGNRVTEVRVHIFPCAPDEAEATRARALALQRELFERNRRGASLTEEQIRQFLRRFYEALDSGDADTAASLFHPGVTIHLWDGVTFTSREEFREWFERLFSTSKDAWREIKSLEVRGDTVEVHVQLHFTLN

SEQ ID NO: 1299 - protein, 145 aa, synthetic construct
GQKHTVDLTHHFHFRGNRVTEVRVHIFPCAPDEAEAARARALALQARLFAEHARPASLSEEQIRQFLRRFYEALDSGDADTAASLFHPGVTIHLWDGVTFTSREEFREWFERLFSTSKDAWREIKSLEVRGDTVEVHVQLHFTLN

SEQ ID NO: 1300 - protein, 145 aa, synthetic construct
GQKHTVDLTHHFHFRGNRVTEVRVHIFPCAPDQKEECEARSLALLRELVEAHARGASLSEEQIRQFLRRFYEALDSGDADTAASLFHPGVTIHLWDGVTFTSREEFREWFERLFSTSKDAWREIKSLEVRGDTVEVHVQLHFTLN

SEQ ID NO: 1301 - protein, 145 aa, synthetic construct
GQKHTVDLTHHFHFRGNRVTEVRVHIFPAAPDAREETAARAAALQRELVEAHARGASLSEEQIRQFLRRFYEALDSGDADTAASLFHPGVTIHLWDGVTFTSREEFREWFERLFSTSKDAWREIKSLEVRGDTVEVHVQLHFTLN

SEQ ID NO: 1302 - protein, 145 aa, synthetic construct
GQKHTVDLTHHFHFRGNRVTEVRVHIFPAAPDEAEATAARSLALQARLVAEHARGASLSEEQIRQFLRRFYEALDSGDADTAASLFHPGVTIHLWDGVTFTSREEFREWFERLFSTSKDAWREIKSLEVRGDTVEVHVQLHFTLN

SEQ ID NO: 1303 - protein, 145 aa, synthetic construct
GQKHTVDLTHHFHFRGNRVTEVRVHIFPSAPDKAEETAARALALQRELVAAHARGASLTEEQIRQFLRRFYEALDSGDADTAASLFHPGVTIHLWDGVTFTSREEFREWFERLFSTSKDAWREIKSLEVRGDTVEVHVQLHFTLN

SEQ ID NO: 1304 - protein, 145 aa, synthetic construct
GQKHTVDLTHHFHFRGNRVTEVRVHIFPSAPDRHEETAAQSLALQAQLVAENARGASLSEEQIRQFLRRFYEALDSGDADTAASLFHPGVTIHLWDGVTFTSREEFREWFERLFSTSKDAWREIKSLEVRGDTVEVHVQLHFTLN

SEQ ID NO: 1305 - protein, 145 aa, synthetic construct
GQKHTVDLTHHFHFRGNRVTEVRVHIFPAAPDEKEATAARALALQAALVAAHARGASLSEEQIRQFLRRFYEALDSGDADTAASLFHPGVTIHLWDGVTFTSREEFREWFERLFSTSKDAWREIKSLEVRGDTVEVHVQLHFTLN

SEQ ID NO: 1306 - protein, 145 aa, synthetic construct
GQKHTVDLTHHFHFRGNRVTEVRVHIFPSAPDRAEETRQRSLALLRELVAAHARGASLSEEQIRQFLRRFYEALDSGDADTAASLFHPGVTIHLWDGVTFTSREEFREWFERLFSTSKDAWREIKSLEVRGDTVEVHVQLHFTLN

SEQ ID NO: 1307 - protein, 145 aa, synthetic construct
GQKHTVDLTHHFHFRGNRVTEVRVHIFPVAPDEAEEAAARSLALQRELVERHAGPASLSEEQIRQFLRRFYEALDSGDADTAASLFHPGVTIHLWDGVTFTSREEFREWFERLFSTSKDAWREIKSLEVRGDTVEVHVQLHFTLN

SEQ ID NO: 1308 - protein, 145 aa, synthetic construct
GQKHTVDLTHHFHFRGNRVTEVRVHIFPAAPDEAEATAARSAALLAQLVAEHARPASLSEEQIRQFLRRFYEALDSGDADTAASLFHPGVTIHLWDGVTFTSREEFREWFERLFSTSKDAWREIKSLEVRGDTVEVHVQLHFTLN

SEQ ID NO: 1309 - protein, 145 aa, synthetic construct
GQKHTVDLTHHFHFRGNRVTEVRVHIFPCAPDAAEECRARSLALQAELFAAHARGASLSEEQIRQFLRRFYEALDSGDADTAASLFHPGVTIHLWDGVTFTSREEFREWFERLFSTSKDAWREIKSLEVRGDTVEVHVQLHFTLN

SEQ ID NO: 1310 - protein, 145 aa, synthetic construct
GQKHTVDLTHHFHFRGNRVTEVRVHIFPCAPDEKEACEAKSLALQEELFAAHAGPASLTEEQIRQFLRRFYEALDSGDADTAASLFHPGVTIHLWDGVTFTSREEFREWFERLFSTSKDAWREIKSLEVRGDTVEVHVQLHFTLN

SEQ ID NO: 1311 - protein, 145 aa, synthetic construct
GQKHTVDLTHHFHFRGNRVTEVRVHIFPCAPDEKEECAARSLALQRELVAAHARGASLSEEQIRQFLRRFYEALDSGDADTAASLFHPGVTIHLWDGVTFTSREEFREWFERLFSTSKDAWREIKSLEVRGDTVEVHVQLHFTLN

SEQ ID NO: 1312 - protein, 145 aa, synthetic construct
GQKHTVDLTHHFHFRGNRVTEVRVHIFPVAPDKAEEAAARSLALLERLVAENAGPASLTEEQIRQFLRRFYEALDSGDADTAASLFHPGVTIHLWDGVTFTSREEFREWFERLFSTSKDAWREIKSLEVRGDTVEVHVQLHFTLN

SEQ ID NO: 1313 - protein, 145 aa, synthetic construct
GQKHTVDLTHHFHFRGNRVTEVRVHIFPAAPDDAEATAARAAALQAELFAAHARGASLTEEQIRQFLRRFYEALDSGDADTAASLFHPGVTIHLWDGVTFTSREEFREWFERLFSTSKDAWREIKSLEVRGDTVEVHVQLHFTLN

SEQ ID NO: 1314 - protein, 145 aa, synthetic construct
GQKHTVDLTHHFHFRGNRVTEVRVHIFPVAPDEAEAAEARSLALQRELVEAHAGPASLSEEQIRQFLRRFYEALDSGDADTAASLFHPGVTIHLWDGVTFTSREEFREWFERLFSTSKDAWREIKSLEVRGDTVEVHVQLHFTLN

SEQ ID NO: 1315 - protein, 145 aa, synthetic construct
GQKHTVDLTHHFHFRGNRVTEVRVHIFPAAPDEAEATRARALALQRELFEAHAREASLTEEQIRQFLRRFYEALDSGDADTAASLFHPGVTIHLWDGVTFTSREEFREWFERLFSTSKDAWREIKSLEVRGDTVEVHVQLHFTLN

SEQ ID NO: 1316 - protein, 145 aa, synthetic construct
GQKHTVDLTHHFHFRGNRVTEVRVHIFPSAPDKAEETEARSLALQRRLYEEHARPASLSEEQIRQFLRRFYEALDSGDADTAASLFHPGVTIHLWDGVTFTSREEFREWFERLFSTSKDAWREIKSLEVRGDTVEVHVQLHFTLN

SEQ ID NO: 1317 - protein, 145 aa, synthetic construct
GQKHTVDLTHHFHFRGNRVTEVRVHIFPAAPDAQEETAARSLALLAELVAAHAGPASLTEEQIRQFLRRFYEALDSGDADTAASLFHPGVTIHLWDGVTFTSREEFREWFERLFSTSKDAWREIKSLEVRGDTVEVHVQLHFTLN

SEQ ID NO: 1318 - protein, 146 aa, synthetic construct
GQKHTVDLTHHFHFRGNRVTEVRVHINPTVEDEEELEEALERALELAEEALEELRGPPMSEEQIRQFLRRFYEALDSGDADTAASLFHPGVTIHLWDGVTFTSREEFREWFERLFSTSKDAWREIKSLEVRGDTVEVHVQLHFTLN

SEQ ID NO: 1319 - protein, 146 aa, synthetic construct
GQKHTVDLTHHFHFRGNRVTEVRVHIIEVESEEAAPAAQEESLALQAQLLAEHAGPASISEEQIRQFLRRFYEALDSGDADTAASLFHPGVTIHLWDGVTFTSREEFREWFERLFSTSKDAWREIKSLEVRGDTVEVHVQLHFTLN

SEQ ID NO: 1320 - protein, 146 aa, synthetic construct
GQKHTVDLTHHFHFRGNRVTEVRVHIIPVESEEAAPEAEAKSLALMEELLAAHAGPASISEEQIRQFLRRFYEALDSGDADTAASLFHPGVTIHLWDGVTFTSREEFREWFERLFSTSKDAWREIKSLEVRGDTVEVHVQLHFTLN

SEQ ID NO: 1321 - protein, 146 aa, synthetic construct
GQKHTVDLTHHFHFRGNRVTEVRVHIFEAASEEDIPATQARSLALQRELLAAHARPASISEEQIRQFLRRFYEALDSGDADTAASLFHPGVTIHLWDGVTFTSREEFREWFERLFSTSKDAWREIKSLEVRGDTVEVHVQLHFTLN

SEQ ID NO: 1322 - protein, 146 aa, synthetic construct
GQKHTVDLTHHFHFRGNRVTEVRVHIIEVPSPEAVPAAQAESLALQAELLAAHAGPASISEEQIRQFLRRFYEALDSGDADTAASLFHPGVTIHLWDGVTFTSREEFREWFERLFSTSKDAWREIKSLEVRGDTVEVHVQLHFTLN

SEQ ID NO: 1323 - protein, 146 aa, synthetic construct
GQKHTVDLTHHFHFRGNRVTEVRVHIIEVASEADAPAAAARAAALQAELLAAHAGPASISEEQIRQFLRRFYEALDSGDADTAASLFHPGVTIHLWDGVTFTSREEFREWFERLFSTSKDAWREIKSLEVRGDTVEVHVQLHFTLN

SEQ ID NO: 1324 - protein, 146 aa, synthetic construct
GQKHTVDLTHHFHFRGNRVTEVRVHIIDVPSEEAVPEAEARSLALQRELLAAHAGPASISEEQIRQFLRRFYEALDSGDADTAASLFHPGVTIHLWDGVTFTSREEFREWFERLFSTSKDAWREIKSLEVRGDTVEVHVQLHFTLN

SEQ ID NO: 1325 - protein, 146 aa, synthetic construct
GQKHTVDLTHHFHFRGNRVTEVRVHIIEVPDEAAAPAAQAEALALQAELLAAHARGASISEEQIRQFLRRFYEALDSGDADTAASLFHPGVTIHLWDGVTFTSREEFREWFERLFSTSKDAWREIKSLEVRGDTVEVHVQLHFTLN

SEQ ID NO: 1326 - protein, 146 aa, synthetic construct
GQKHTVDLTHHFHFRGNRVTEVRVHIIESESEEKVPETQAKSLALQERLLAEHARGASISEEQIRQFLRRFYEALDSGDADTAASLFHPGVTIHLWDGVTFTSREEFREWFERLFSTSKDAWREIKSLEVRGDTVEVHVQLHFTLN

SEQ ID NO: 1327 - protein, 146 aa, synthetic construct
GQKHTVDLTHHFHFRGNRVTEVRVHIFEAPSPEAVPAVAAQSAALQAELLAAHARGASISEEQIRQFLRRFYEALDSGDADTAASLFHPGVTIHLWDGVTFTSREEFREWFERLFSTSKDAWREIKSLEVRGDTVEVHVQLHFTLN

SEQ ID NO: 1328 - protein, 146 aa, synthetic construct
GQKHTVDLTHHFHFRGNRVTEVRVHIIEVESEADLPAAQAQALALQRELLAAHAGPASISEEQIRQFLRRFYEALDSGDADTAASLFHPGVTIHLWDGVTFTSREEFREWFERLFSTSKDAWREIKSLEVRGDTVEVHVQLHFTLN

SEQ ID NO: 1329 - protein, 146 aa, synthetic construct
GQKHTVDLTHHFHFRGNRVTEVRVHIIEVESEEAVPAAQARALALQAELLAAHAGPASISEEQIRQFLRRFYEALDSGDADTAASLFHPGVTIHLWDGVTFTSREEFREWFERLFSTSKDAWREIKSLEVRGDTVEVHVQLHFTLN

SEQ ID NO: 1330 - protein, 146 aa, synthetic construct
GQKHTVDLTHHFHFRGNRVTEVRVHIIEVPSEEAAPAAQAESLALQREILAAHARPASISEEQIRQFLRRFYEALDSGDADTAASLFHPGVTIHLWDGVTFTSREEFREWFERLFSTSKDAWREIKSLEVRGDTVEVHVQLHFTLN

SEQ ID NO: 1331 - protein, 146 aa, synthetic construct
GQKHTVDLTHHFHFRGNRVTEVRVHIIEVPSEEAAPAAEAEALALQRELLAAHAGPASISEEQIRQFLRRFYEALDSGDADTAASLFHPGVTIHLWDGVTFTSREEFREWFERLFSTSKDAWREIKSLEVRGDTVEVHVQLHFTLN

SEQ ID NO: 1332 - protein, 146 aa, synthetic construct
GQKHTVDLTHHFHFRGNRVTEVRVHIFETPSEAAAPETQARVLALQARLLAEHAGPASISEEQIRQFLRRFYEALDSGDADTAASLFHPGVTIHLWDGVTFTSREEFREWFERLFSTSKDAWREIKSLEVRGDTVEVHVQLHFTLN

SEQ ID NO: 1333 - protein, 146 aa, synthetic construct
GQKHTVDLTHHFHFRGNRVTEVRVHIIEAESEEAVPEAQARSLALQAELLAAHAGPASISEEQIRQFLRRFYEALDSGDADTAASLFHPGVTIHLWDGVTFTSREEFREWFERLFSTSKDAWREIKSLEVRGDTVEVHVQLHFTLN

SEQ ID NO: 1334 - protein, 146 aa, synthetic construct
GQKHTVDLTHHFHFRGNRVTEVRVHIIPVASPEDEPAALAESLALQAELLAAHAGPASISEEQIRQFLRRFYEALDSGDADTAASLFHPGVTIHLWDGVTFTSREEFREWFERLFSTSKDAWREIKSLEVRGDTVEVHVQLHFTLN

SEQ ID NO: 1335 - protein, 146 aa, synthetic construct
GQKHTVDLTHHFHFRGNRVTEVRVHIIEVESEEQAPEAHARSLALMERLLAEHAGPASISEEQIRQFLRRFYEALDSGDADTAASLFHPGVTIHLWDGVTFTSREEFREWFERLFSTSKDAWREIKSLEVRGDTVEVHVQLHFTLN

SEQ ID NO: 1336 - protein, 146 aa, synthetic construct
GQKHTVDLTHHFHFRGNRVTEVRVHIIEVESEEKVPEAEARSLALQAELLAAHAGPASISEEQIRQFLRRFYEALDSGDADTAASLFHPGVTIHLWDGVTFTSREEFREWFERLFSTSKDAWREIKSLEVRGDTVEVHVQLHFTLN

SEQ ID NO: 1337 - protein, 146 aa, synthetic construct
GQKHTVDLTHHFHFRGNRVTEVRVHIFEAASEADIPATQARALAHQAELLAAHAGPASISEEQIRQFLRRFYEALDSGDADTAASLFHPGVTIHLWDGVTFTSREEFREWFERLFSTSKDAWREIKSLEVRGDTVEVHVQLHFTLN

SEQ ID NO: 1338 - protein, 146 aa, synthetic construct
GQKHTVDLTHHFHFRGNRVTEVRVHIIEAESEEAIPEAEARSLALQRELLAAHARPASISEEQIRQFLRRFYEALDSGDADTAASLFHPGVTIHLWDGVTFTSREEFREWFERLFSTSKDAWREIKSLEVRGDTVEVHVQLHFTLN

SEQ ID NO: 1339 - protein, 147 aa, synthetic construct
GQKHTVDLTHHFHFRGNRVTEVRVHINPTVEPPPGLRELLLELLEELLELLLELLGAPPMSEEQIRQFLRRFYEALDSGDADTAASLFHPGVTIHLWDGVTFTSREEFREWFERLFSTSKDAWREIKSLEVRGDTVEVHVQLHFTLN

SEQ ID NO: 1340 - protein, 147 aa, synthetic construct
GQKHTVDLTHHFHFRGNRVTEVRVHIRVIKPAPWLTESTEAGFEELRAAWAAAEGAPASISEEQIRQFLRRFYEALDSGDADTAASLFHPGVTIHLWDGVTFTSREEFREWFERLFSTSKDAWREIKSLEVRGDTVEVHVQLHFTLN

SEQ ID NO: 1341 - protein, 147 aa, synthetic construct
GQKHTVDLTHHFHFRGNRVTEVRVHITVRKPPPWLTVSNTAGLAELAAAWAAAAGAPASISEEQIRQFLRRFYEALDSGDADTAASLFHPGVTIHLWDGVTFTSREEFREWFERLFSTSKDAWREIKSLEVRGDTVEVHVQLHFTLN

SEQ ID NO: 1342 - protein, 147 aa, synthetic construct
GQKHTVDLTHHFHFRGNRVTEVRVHITVRTPAPFLTTSDTAGLEELAALRAADAGRPASISEEQIRQFLRRFYEALDSGDADTAASLFHPGVTIHLWDGVTFTSREEFREWFERLFSTSKDAWREIKSLEVRGDTVEVHVQLHFTLN

SEQ ID NO: 1343 - protein, 147 aa, synthetic construct
GQKHTVDLTHHFHFRGNRVTEVRVHITVKTPAPFLTESNTAGLEELRALWAADAGRPASISEEQIRQFLRRFYEALDSGDADTAASLFHPGVTIHLWDGVTFTSREEFREWFERLFSTSKDAWREIKSLEVRGDTVEVHVQLHFTLN

SEQ ID NO: 1344 - protein, 147 aa, synthetic construct
GQKHTVDLTHHFHFRGNRVTEVRVHIRVITPAPFLTRSTDAGFAELAAAWAAAAGAPASISEEQIRQFLRRFYEALDSGDADTAASLFHPGVTIHLWDGVTFTSREEFREWFERLFSTSKDAWREIKSLEVRGDTVEVHVQLHFTLN

SEQ ID NO: 1345 - protein, 147 aa, synthetic construct
GQKHTVDLTHHFHFRGNRVTEVRVHIEVRTPPPWLTESTTAGLAELAALWAAAAGRPASISEEQIRQFLRRFYEALDSGDADTAASLFHPGVTIHLWDGVTFTSREEFREWFERLFSTSKDAWREIKSLEVRGDTVEVHVQLHFTLN

SEQ ID NO: 1346 - protein, 147 aa, synthetic construct
GQKHTVDLTHHFHFRGNRVTEVRVHILVRKPPPWLTESDEAGLAELRAAWEAAAGRPASISEEQIRQFLRRFYEALDSGDADTAASLFHPGVTIHLWDGVTFTSREEFREWFERLFSTSKDAWREIKSLEVRGDTVEVHVQLHFTLN

SEQ ID NO: 1347 - protein, 147 aa, synthetic construct
GQKHTVDLTHHFHFRGNRVTEVRVHIEVRKPPPFLTRSDTAGLEELAALRAAAAGRPASISEEQIRQFLRRFYEALDSGDADTAASLFHPGVTIHLWDGVTFTSREEFREWFERLFSTSKDAWREIKSLEVRGDTVEVHVQLHFTLN

SEQ ID NO: 1348 - protein, 147 aa, synthetic construct
GQKHTVDLTHHFHFRGNRVTEVRVHIEVIKAPPWLTESNTAGLAELRAAWAAAAGAPASISEEQIRQFLRRFYEALDSGDADTAASLFHPGVTIHLWDGVTFTSREEFREWFERLFSTSKDAWREIKSLEVRGDTVEVHVQLHFTLN

SEQ ID NO: 1349 - protein, 147 aa, synthetic construct
GQKHTVDLTHHFHFRGNRVTEVRVHIRVRKPPPWLTESNDAGFAELAALAARDAGRPASISEEQIRQFLRRFYEALDSGDADTAASLFHPGVTIHLWDGVTFTSREEFREWFERLFSTSKDAWREIKSLEVRGDTVEVHVQLHFTLN

SEQ ID NO: 1350 - protein, 147 aa, synthetic construct
GQKHTVDLTHHFHFRGNRVTEVRVHILVRKPAPFLTRSNEAGLAELAAARAAAAGRPASISEEQIRQFLRRFYEALDSGDADTAASLFHPGVTIHLWDGVTFTSREEFREWFERLFSTSKDAWREIKSLEVRGDTVEVHVQLHFTLN

SEQ ID NO: 1351 - protein, 147 aa, synthetic construct
GQKHTVDLTHHFHFRGNRVTEVRVHILVRKPPPFLTESTEAGLEELAALWAADEGRPASISEEQIRQFLRRFYEALDSGDADTAASLFHPGVTIHLWDGVTFTSREEFREWFERLFSTSKDAWREIKSLEVRGDTVEVHVQLHFTLN

SEQ ID NO: 1352 - protein, 147 aa, synthetic construct
GQKHTVDLTHHFHFRGNRVTEVRVHILVRKPAPFLTRSDEAGLEELAALRAAAAGRPASISEEQIRQFLRRFYEALDSGDADTAASLFHPGVTIHLWDGVTFTSREEFREWFERLFSTSKDAWREIKSLEVRGDTVEVHVQLHFTLN

SEQ ID NO: 1353 - protein, 147 aa, synthetic construct
GQKHTVDLTHHFHFRGNRVTEVRVHITVRKPPPFLTESTTAGLAELAEAWAAAAGRPASISEEQIRQFLRRFYEALDSGDADTAASLFHPGVTIHLWDGVTFTSREEFREWFERLFSTSKDAWREIKSLEVRGDTVEVHVQLHFTLN

SEQ ID NO: 1354 - protein, 147 aa, synthetic construct
GQKHTVDLTHHFHFRGNRVTEVRVHITVRTPPPFLTRSNTAGLAELAALRAAAAGRPASISEEQIRQFLRRFYEALDSGDADTAASLFHPGVTIHLWDGVTFTSREEFREWFERLFSTSKDAWREIKSLEVRGDTVEVHVQLHFTLN

SEQ ID NO: 1355 - protein, 147 aa, synthetic construct
GQKHTVDLTHHFHFRGNRVTEVRVHIRVVTPPPWLTRSNDAGFAELAAAWAADAGRPASISEEQIRQFLRRFYEALDSGDADTAASLFHPGVTIHLWDGVTFTSREEFREWFERLFSTSKDAWREIKSLEVRGDTVEVHVQLHFTLN

SEQ ID NO: 1356 - protein, 147 aa, synthetic construct
GQKHTVDLTHHFHFRGNRVTEVRVHIRVEKPPPFLKKSNTEGFAELAAARAAAAGRPASISEEQIRQFLRRFYEALDSGDADTAASLFHPGVTIHLWDGVTFTSREEFREWFERLFSTSKDAWREIKSLEVRGDTVEVHVQLHFTLN

SEQ ID NO: 1357 - protein, 147 aa, synthetic construct
GQKHTVDLTHHFHFRGNRVTEVRVHIEVVKPPPFLKESNTAGLEELRALWAERAGAPASISEEQIRQFLRRFYEALDSGDADTAASLFHPGVTIHLWDGVTFTSREEFREWFERLFSTSKDAWREIKSLEVRGDTVEVHVQLHFTLN

SEQ ID NO: 1358 - protein, 147 aa, synthetic construct
GQKHTVDLTHHFHFRGNRVTEVRVHILVRKPPPFLKESNEEGLAELRAAWEAAAGRPASISEEQIRQFLRRFYEALDSGDADTAASLFHPGVTIHLWDGVTFTSREEFREWFERLFSTSKDAWREIKSLEVRGDTVEVHVQLHFTLN

SEQ ID NO: 1359 - protein, 147 aa, synthetic construct
GQKHTVDLTHHFHFRGNRVTEVRVHILVRKPAPFLKVSDLAGLEELRAAWAAAAGRPAEISEEQIRQFLRRFYEALDSGDADTAASLFHPGVTIHLWDGVTFTSREEFREWFERLFSTSKDAWREIKSLEVRGDTVEVHVQLHFTLN

SEQ ID NO: 1360 - protein, 148 aa, synthetic construct
GQKHTVDLTHHFHFRGNRVTEVRVHINPTVPEDDLEEALELLLLLLLLLLLELLAEEPPPMSEEQIRQFLRRFYEALDSGDADTAASLFHPGVTIHLWDGVTFTSREEFREWFERLFSTSKDAWREIKSLEVRGDTVEVHVQLHFTLN

SEQ ID NO: 1361 - protein, 148 aa, synthetic construct
GQKHTVDLTHHFHFRGNRVTEVRVHIREAPVDDVEAPSAAALAELRARVAEVAATRPEATISEEQIRQFLRRFYEALDSGDADTAASLFHPGVTIHLWDGVTFTSREEFREWFERLFSTSKDAWREIKSLEVRGDTVEVHVQLHFTLN

SEQ ID NO: 1362 - protein, 148 aa, synthetic construct
GQKHTVDLTHHFHFRGNRVTEVRVHIRESPVDDVEAPSAAALEELRRRVEEAAAVRPEATISEEQIRQFLRRFYEALDSGDADTAASLFHPGVTIHLWDGVTFTSREEFREWFERLFSTSKDAWREIKSLEVRGDTVEVHVQLHFTLN

SEQ ID NO: 1363 - protein, 148 aa, synthetic construct
GQKHTVDLTHHFHFRGNRVTEVRVHITEAPVDDVEAPAAANLAELRARVAERAAERPEATISEEQIRQFLRRFYEALDSGDADTAASLFHPGVTIHLWDGVTFTSREEFREWFERLFSTSKDAWREIKSLEVRGDTVEVHVQLHFTLN

SEQ ID NO: 1364 - protein, 148 aa, synthetic construct
GQKHTVDLTHHFHFRGNRVTEVRVHIREAPVDDVETVSAEVLAELRRRVEELAAERPEATISEEQIRQFLRRFYEALDSGDADTAASLFHPGVTIHLWDGVTFTSREEFREWFERLFSTSKDAWREIKSLEVRGDTVEVHVQLHFTLN

SEQ ID NO: 1365 - protein, 148 aa, synthetic construct
GQKHTVDLTHHFHFRGNRVTEVRVHIREAPVDDVEAPSAAALEELRRRVEEVAARRPEATISEEQIRQFLRRFYEALDSGDADTAASLFHPGVTIHLWDGVTFTSREEFREWFERLFSTSKDAWREIKSLEVRGDTVEVHVQLHFTLN

SEQ ID NO: 1366 - protein, 148 aa, synthetic construct
GQKHTVDLTHHFHFRGNRVTEVRVHIVEAPVDNVEEVSAAVLEELRARVAEAAAERPEATISEEQIRQFLRRFYEALDSGDADTAASLFHPGVTIHLWDGVTFTSREEFREWFERLFSTSKDAWREIKSLEVRGDTVEVHVQLHFTLN

SEQ ID NO: 1367 - protein, 148 aa, synthetic construct
GQKHTVDLTHHFHFRGNRVTEVRVHITEAPVEDVEAVSAANLARLRERVAEVAATRPEASISEEQIRQFLRRFYEALDSGDADTAASLFHPGVTIHLWDGVTFTSREEFREWFERLFSTSKDAWREIKSLEVRGDTVEVHVQLHFTLN

SEQ ID NO: 1368 - protein, 148 aa, synthetic construct
GQKHTVDLTHHFHFRGNRVTEVRVHITEAPNDNVEEVSERNLEELRARVEEAAATRPEATISEEQIRQFLRRFYEALDSGDADTAASLFHPGVTIHLWDGVTFTSREEFREWFERLFSTSKDAWREIKSLEVRGDTVEVHVQLHFTLN

SEQ ID NO: 1369 - protein, 148 aa, synthetic construct
GQKHTVDLTHHFHFRGNRVTEVRVHITEAPVDDVEAPSAANLERQRARVAEAAATRPEATISEEQIRQFLRRFYEALDSGDADTAASLFHPGVTIHLWDGVTFTSREEFREWFERLFSTSKDAWREIKSLEVRGDTVEVHVQLHFTLN

SEQ ID NO: 1370 - protein, 148 aa, synthetic construct
GQKHTVDLTHHFHFRGNRVTEVRVHITPSPVDDVETTSAENLAELAARVEEAAAVRPEASISEEQIRQFLRRFYEALDSGDADTAASLFHPGVTIHLWDGVTFTSREEFREWFERLFSTSKDAWREIKSLEVRGDTVEVHVQLHFTLN

SEQ ID NO: 1371 - protein, 148 aa, synthetic construct
GQKHTVDLTHHFHFRGNRVTEVRVHITESPVDDVETVSAENLERLRRRVAEAAATRPEATISEEQIRQFLRRFYEALDSGDADTAASLFHPGVTIHLWDGVTFTSREEFREWFERLFSTSKDAWREIKSLEVRGDTVEVHVQLHFTLN

SEQ ID NO: 1372 - protein, 148 aa, synthetic construct
GQKHTVDLTHHFHFRGNRVTEVRVHITEAPVDDVETVSAANLEELRARVAELAAERPEATISEEQIRQFLRRFYEALDSGDADTAASLFHPGVTIHLWDGVTFTSREEFREWFERLFSTSKDAWREIKSLEVRGDTVEVHVQLHFTLN

SEQ ID NO: 1373 - protein, 148 aa, synthetic construct
GQKHTVDLTHHFHFRGNRVTEVRVHITESPVDDVEAPSERVLAEQRARVAEVAAERPEATISEEQIRQFLRRFYEALDSGDADTAASLFHPGVTIHLWDGVTFTSREEFREWFERLFSTSKDAWREIKSLEVRGDTVEVHVQLHFTLN

SEQ ID NO: 1374 - protein, 148 aa, synthetic construct
GQKHTVDLTHHFHFRGNRVTEVRVHIRESPVDNVEEPSAAALAEQAARVAELAATRPEATISEEQIRQFLRRFYEALDSGDADTAASLFHPGVTIHLWDGVTFTSREEFREWFERLFSTSKDAWREIKSLEVRGDTVEVHVQLHFTLN

SEQ ID NO: 1375 - protein, 148 aa, synthetic construct
GQKHTVDLTHHFHFRGNRVTEVRVHITEAPVDDVETVSAENLARLRRRVEEEAARRPEATISEEQIRQFLRRFYEALDSGDADTAASLFHPGVTIHLWDGVTFTSREEFREWFERLFSTSKDAWREIKSLEVRGDTVEVHVQLHFTLN

SEQ ID NO: 1376 - protein, 148 aa, synthetic construct
GQKHTVDLTHHFHFRGNRVTEVRVHITESPVDDVETPSAENLERLRARVEEVAAVRPEATISEEQIRQFLRRFYEALDSGDADTAASLFHPGVTIHLWDGVTFTSREEFREWFERLFSTSKDAWREIKSLEVRGDTVEVHVQLHFTLN

SEQ ID NO: 1377 - protein, 148 aa, synthetic construct
GQKHTVDLTHHFHFRGNRVTEVRVHITEAPVDNVEEPSAENLARLRERVAEAAARRPEATISEEQIRQFLRRFYEALDSGDADTAASLFHPGVTIHLWDGVTFTSREEFREWFERLFSTSKDAWREIKSLEVRGDTVEVHVQLHFTLN

SEQ ID NO: 1378 - protein, 148 aa, synthetic construct
GQKHTVDLTHHFHFRGNRVTEVRVHITEAPVDNVEEVSAENLEELRRRVEEAAAERPEATISEEQIRQFLRRFYEALDSGDADTAASLFHPGVTIHLWDGVTFTSREEFREWFERLFSTSKDAWREIKSLEVRGDTVEVHVQLHFTLN

SEQ ID NO: 1379 - protein, 148 aa, synthetic construct
GQKHTVDLTHHFHFRGNRVTEVRVHITEAPVDDVESVSAANLARLRERVAERAAEHPEATISEEQIRQFLRRFYEALDSGDADTAASLFHPGVTIHLWDGVTFTSREEFREWFERLFSTSKDAWREIKSLEVRGDTVEVHVQLHFTLN

SEQ ID NO: 1380 - protein, 148 aa, synthetic construct
GQKHTVDLTHHFHFRGNRVTEVRVHIVEAPVDDVETVSAEVLAELARRVAEAAATRPEATISEEQIRQFLRRFYEALDSGDADTAASLFHPGVTIHLWDGVTFTSREEFREWFERLFSTSKDAWREIKSLEVRGDTVEVHVQLHFTLN

SEQ ID NO: 1381 - protein, 149 aa, synthetic construct
GQKHTVDLTHHFHFRGNRVTEVRVHINPTVPDEDEEELEEALERALELARELLAELGEPPPMSEEQIRQFLRRFYEALDSGDADTAASLFHPGVTIHLWDGVTFTSREEFREWFERLFSTSKDAWREIKSLEVRGDTVEVHVQLHFTLN

SEQ ID NO: 1382 - protein, 149 aa, synthetic construct
GQKHTVDLTHHFHFRGNRVTEVRVHIIPCPSLSQEAIDAALAKSRALAAELLAEAGDPPPSISEEQIRQFLRRFYEALDSGDADTAASLFHPGVTIHLWDGVTFTSREEFREWFERLFSTSKDAWREIKSLEVRGDTVEVHVQLHFTLN

SEQ ID NO: 1383 - protein, 149 aa, synthetic construct
GQKHTVDLTHHFHFRGNRVTEVRVHIFPCPSLSPEAIEAAQARCLALQRELLAEAGDPPPSISEEQIRQFLRRFYEALDSGDADTAASLFHPGVTIHLWDGVTFTSREEFREWFERLFSTSKDAWREIKSLEVRGDTVEVHVQLHFTLN

SEQ ID NO: 1384 - protein, 149 aa, synthetic construct
GQKHTVDLTHHFHFRGNRVTEVRVHIIPCPSLDEASIEAALAESLALQRAGLAEAGAPAPSISEEQIRQFLRRFYEALDSGDADTAASLFHPGVTIHLWDGVTFTSREEFREWFERLFSTSKDAWREIKSLEVRGDTVEVHVQLHFTLN

SEQ ID NO: 1385 - protein, 149 aa, synthetic construct
GQKHTVDLTHHFHFRGNRVTEVRVHIIPCPSLDPESIEAALARSRALMAERLAEAGDPPASISEEQIRQFLRRFYEALDSGDADTAASLFHPGVTIHLWDGVTFTSREEFREWFERLFSTSKDAWREIKSLEVRGDTVEVHVQLHFTLN

SEQ ID NO: 1386 - protein, 149 aa, synthetic construct
GQKHTVDLTHHFHFRGNRVTEVRVHIFPSPSLDEASIEATLARTRALMAERLAEAGDPPASISEEQIRQFLRRFYEALDSGDADTAASLFHPGVTIHLWDGVTFTSREEFREWFERLFSTSKDAWREIKSLEVRGDTVEVHVQLHFTLN

SEQ ID NO: 1387 - protein, 149 aa, synthetic construct
GQKHTVDLTHHFHFRGNRVTEVRVHIIPAPSLDEASIEAALAKSLALQAELLAEAGAPPAEISEEQIRQFLRRFYEALDSGDADTAASLFHPGVTIHLWDGVTFTSREEFREWFERLFSTSKDAWREIKSLEVRGDTVEVHVQLHFTLN

SEQ ID NO: 1388 - protein, 149 aa, synthetic construct
GQKHTVDLTHHFHFRGNRVTEVRVHIFPSPSLSQEAIDATQERCLALQAERLAEAGDPPASISEEQIRQFLRRFYEALDSGDADTAASLFHPGVTIHLWDGVTFTSREEFREWFERLFSTSKDAWREIKSLEVRGDTVEVHVQLHFTLN

SEQ ID NO: 1389 - protein, 149 aa, synthetic construct
GQKHTVDLTHHFHFRGNRVTEVRVHIIPCESLDEESIQAALERCRALAAELLAEAGAPPPEISEEQIRQFLRRFYEALDSGDADTAASLFHPGVTIHLWDGVTFTSREEFREWFERLFSTSKDAWREIKSLEVRGDTVEVHVQLHFTLN

SEQ ID NO: 1390 - protein, 149 aa, synthetic construct
GQKHTVDLTHHFHFRGNRVTEVRVHIFPCPDLSPASIEAALERCRALAAEGLAAAGAPPASISEEQIRQFLRRFYEALDSGDADTAASLFHPGVTIHLWDGVTFTSREEFREWFERLFSTSKDAWREIKSLEVRGDTVEVHVQLHFTLN

SEQ ID NO: 1391 - protein, 149 aa, synthetic construct
GQKHTVDLTHHFHFRGNRVTEVRVHIIPCPDLSQEAIDAALARSLALQAEGLAEAGAPPPEISEEQIRQFLRRFYEALDSGDADTAASLFHPGVTIHLWDGVTFTSREEFREWFERLFSTSKDAWREIKSLEVRGDTVEVHVQLHFTLN

SEQ ID NO: 1392 - protein, 149 aa, synthetic construct
GQKHTVDLTHHFHFRGNRVTEVRVHIIPCPSLDQESIDAALAQARALQAEILAEAGAPPASISEEQIRQFLRRFYEALDSGDADTAASLFHPGVTIHLWDGVTFTSREEFREWFERLFSTSKDAWREIKSLEVRGDTVEVHVQLHFTLN

SEQ ID NO: 1393 - protein, 149 aa, synthetic construct
GQKHTVDLTHHFHFRGNRVTEVRVHIFPCPDLSEASIAAALARCRALAAERRAEAGAPAPEISEEQIRQFLRRFYEALDSGDADTAASLFHPGVTIHLWDGVTFTSREEFREWFERLFSTSKDAWREIKSLEVRGDTVEVHVQLHFTLN

SEQ ID NO: 1394 - protein, 149 aa, synthetic construct
GQKHTVDLTHHFHFRGNRVTEVRVHIFPCPSLSPEAIEAALERSRALAAELLAEAGAPPPSISEEQIRQFLRRFYEALDSGDADTAASLFHPGVTIHLWDGVTFTSREEFREWFERLFSTSKDAWREIKSLEVRGDTVEVHVQLHFTLN

SEQ ID NO: 1395 - protein, 149 aa, synthetic construct
GQKHTVDLTHHFHFRGNRVTEVRVHIFPCPSLDQASIDAALARGLALMREGLAEAGAPPPEISEEQIRQFLRRFYEALDSGDADTAASLFHPGVTIHLWDGVTFTSREEFREWFERLFSTSKDAWREIKSLEVRGDTVEVHVQLHFTLN

SEQ ID NO: 1396 - protein, 149 aa, synthetic construct
GQKHTVDLTHHFHFRGNRVTEVRVHIIPCPDLSPEAIEAALAKSLALARELLEEAGAPPASISEEQIRQFLRRFYEALDSGDADTAASLFHPGVTIHLWDGVTFTSREEFREWFERLFSTSKDAWREIKSLEVRGDTVEVHVQLHFTLN

SEQ ID NO: 1397 - protein, 149 aa, synthetic construct
GQKHTVDLTHHFHFRGNRVTEVRVHIFPCPSLDEASIEAALAKSLALQAERLAEAGAPAPEISEEQIRQFLRRFYEALDSGDADTAASLFHPGVTIHLWDGVTFTSREEFREWFERLFSTSKDAWREIKSLEVRGDTVEVHVQLHFTLN

SEQ ID NO: 1398 - protein, 149 aa, synthetic construct
GQKHTVDLTHHFHFRGNRVTEVRVHIIPCPSLSQEAIEAALAEGLALAAELRAEAGDPPASISEEQIRQFLRRFYEALDSGDADTAASLFHPGVTIHLWDGVTFTSREEFREWFERLFSTSKDAWREIKSLEVRGDTVEVHVQLHFTLN

SEQ ID NO: 1399 - protein, 149 aa, synthetic construct
GQKHTVDLTHHFHFRGNRVTEVRVHIFPCPSLSQEAIDAALARGRALQAALLAEAGAPPASISEEQIRQFLRRFYEALDSGDADTAASLFHPGVTIHLWDGVTFTSREEFREWFERLFSTSKDAWREIKSLEVRGDTVEVHVQLHFTLN

SEQ ID NO: 1400 - protein, 149 aa, synthetic construct
GQKHTVDLTHHFHFRGNRVTEVRVHIIPCPSLDPESIEAALARSRALMAELLAEAGDPPPSISEEQIRQFLRRFYEALDSGDADTAASLFHPGVTIHLWDGVTFTSREEFREWFERLFSTSKDAWREIKSLEVRGDTVEVHVQLHFTLN

SEQ ID NO: 1401 - protein, 149 aa, synthetic construct
GQKHTVDLTHHFHFRGNRVTEVRVHIFPCPSLSEEAIEAALAKSRALMAELLAEAGAPPAEISEEQIRQFLRRFYEALDSGDADTAASLFHPGVTIHLWDGVTFTSREEFREWFERLFSTSKDAWREIKSLEVRGDTVEVHVQLHFTLN

SEQ ID NO: 1402 - protein, 150 aa, synthetic construct
GQKHTVDLTHHFHFRGNRVTEVRVHINPTVEPPPELERLLLLLLLLLLLLLLLLLLLLGAPPMSEEQIRQFLRRFYEALDSGDADTAASLFHPGVTIHLWDGVTFTSREEFREWFERLFSTSKDAWREIKSLEVRGDTVEVHVQLHFTLN

SEQ ID NO: 1403 - protein, 150 aa, synthetic construct
GQKHTVDLTHHFHFRGNRVTEVRVHIRPLTPSPLLQALGQDVAALAAEAAALRAAAAGAPASLSEEQIRQFLRRFYEALDSGDADTAASLFHPGVTIHLWDGVTFTSREEFREWFERLFSTSKDAWREIKSLEVRGDTVEVHVQLHFTLN

SEQ ID NO: 1404 - protein, 150 aa, synthetic construct
GQKHTVDLTHHFHFRGNRVTEVRVHIRPLTPSPLLLELGEDVDALAAEAAELRAADAGRPASLSEEQIRQFLRRFYEALDSGDADTAASLFHPGVTIHLWDGVTFTSREEFREWFERLFSTSKDAWREIKSLEVRGDTVEVHVQLHFTLN

SEQ ID NO: 1405 - protein, 150 aa, synthetic construct
GQKHTVDLTHHFHFRGNRVTEVRVHIRVLTPSPLFEALGQRYEELAAEAEALRAAAAGAPASLSEEQIRQFLRRFYEALDSGDADTAASLFHPGVTIHLWDGVTFTSREEFREWFERLFSTSKDAWREIKSLEVRGDTVEVHVQLHFTLN

SEQ ID NO: 1406 - protein, 150 aa, synthetic construct
GQKHTVDLTHHFHFRGNRVTEVRVHIRVLTPSPLFLAAGQVVEEQEAEARALRAADAGRPASLSEEQIRQFLRRFYEALDSGDADTAASLFHPGVTIHLWDGVTFTSREEFREWFERLFSTSKDAWREIKSLEVRGDTVEVHVQLHFTLN

SEQ ID NO: 1407 - protein, 150 aa, synthetic construct
GQKHTVDLTHHFHFRGNRVTEVRVHIRVLTPSPLFEELGEVVAEQEAEAAALRAADAGRPASLSEEQIRQFLRRFYEALDSGDADTAASLFHPGVTIHLWDGVTFTSREEFREWFERLFSTSKDAWREIKSLEVRGDTVEVHVQLHFTLN

SEQ ID NO: 1408 - protein, 150 aa, synthetic construct
GQKHTVDLTHHFHFRGNRVTEVRVHIRVLTPSPLFQALGQDVAALAAEAAELRAAAAGAPASLSEEQIRQFLRRFYEALDSGDADTAASLFHPGVTIHLWDGVTFTSREEFREWFERLFSTSKDAWREIKSLEVRGDTVEVHVQLHFTLN

SEQ ID NO: 1409 - protein, 150 aa, synthetic construct
GQKHTVDLTHHFHFRGNRVTEVRVHIRVLTPSPLFKELGENYAALAAEAEALRAADAGRPASLSEEQIRQFLRRFYEALDSGDADTAASLFHPGVTIHLWDGVTFTSREEFREWFERLFSTSKDAWREIKSLEVRGDTVEVHVQLHFTLN

SEQ ID NO: 1410 - protein, 150 aa, synthetic construct
GQKHTVDLTHHFHFRGNRVTEVRVHIRPLTPSPLLEALGFTVEELEAEAEELRAADAGRPASLSEEQIRQFLRRFYEALDSGDADTAASLFHPGVTIHLWDGVTFTSREEFREWFERLFSTSKDAWREIKSLEVRGDTVEVHVQLHFTLN

SEQ ID NO: 1411 - protein, 150 aa, synthetic construct
GQKHTVDLTHHFHFRGNRVTEVRVHIRPLTPSPLLEALGADVEALEAEARALREADAGRPASLSEEQIRQFLRRFYEALDSGDADTAASLFHPGVTIHLWDGVTFTSREEFREWFERLFSTSKDAWREIKSLEVRGDTVEVHVQLHFTLN

SEQ ID NO: 1412 - protein, 150 aa, synthetic construct
GQKHTVDLTHHFHFRGNRVTEVRVHIRVLTPSPLFQALGQDVAALEAEAAALRAADAGRPASLTEEQIRQFLRRFYEALDSGDADTAASLFHPGVTIHLWDGVTFTSREEFREWFERLFSTSKDAWREIKSLEVRGDTVEVHVQLHFTLN

SEQ ID NO: 1413 - protein, 150 aa, synthetic construct
GQKHTVDLTHHFHFRGNRVTEVRVHIRPLTPSPLLQALGADVEALEAEARALRAADAGRPASLSEEQIRQFLRRFYEALDSGDADTAASLFHPGVTIHLWDGVTFTSREEFREWFERLFSTSKDAWREIKSLEVRGDTVEVHVQLHFTLN

SEQ ID NO: 1414 - protein, 150 aa, synthetic construct
GQKHTVDLTHHFHFRGNRVTEVRVHIRVLTPSPLLQALGQDEAALAAEAAELRAADAGRPASLSEEQIRQFLRRFYEALDSGDADTAASLFHPGVTIHLWDGVTFTSREEFREWFERLFSTSKDAWREIKSLEVRGDTVEVHVQLHFTLN

SEQ ID NO: 1415 - protein, 150 aa, synthetic construct
GQKHTVDLTHHFHFRGNRVTEVRVHIRVLTPSPLHQALGQREEELAAESRALRAADEGRPASLSEEQIRQFLRRFYEALDSGDADTAASLFHPGVTIHLWDGVTFTSREEFREWFERLFSTSKDAWREIKSLEVRGDTVEVHVQLHFTLN

SEQ ID NO: 1416 - protein, 150 aa, synthetic construct
GQKHTVDLTHHFHFRGNRVTEVRVHIRWLTPSPLLLALGQREAELAAEAAALRAADAGRPASLSEEQIRQFLRRFYEALDSGDADTAASLFHPGVTIHLWDGVTFTSREEFREWFERLFSTSKDAWREIKSLEVRGDTVEVHVQLHFTLN

SEQ ID NO: 1417 - protein, 150 aa, synthetic construct
GQKHTVDLTHHFHFRGNRVTEVRVHIRPLTPSPLLEALGQDVAALAAEAEALRAADRGRPASLTEEQIRQFLRRFYEALDSGDADTAASLFHPGVTIHLWDGVTFTSREEFREWFERLFSTSKDAWREIKSLEVRGDTVEVHVQLHFTLN

SEQ ID NO: 1418 - protein, 150 aa, synthetic construct
GQKHTVDLTHHFHFRGNRVTEVRVHIRVLTPSPLLEALGEDYEALAAEAAELRAADAGRPASLSEEQIRQFLRRFYEALDSGDADTAASLFHPGVTIHLWDGVTFTSREEFREWFERLFSTSKDAWREIKSLEVRGDTVEVHVQLHFTLN

SEQ ID NO: 1419 - protein, 150 aa, synthetic construct
GQKHTVDLTHHFHFRGNRVTEVRVHIRPLTPSPLLQALGETVEELEAEARALREADRGRPASLSEEQIRQFLRRFYEALDSGDADTAASLFHPGVTIHLWDGVTFTSREEFREWFERLFSTSKDAWREIKSLEVRGDTVEVHVQLHFTLN

SEQ ID NO: 1420 - protein, 150 aa, synthetic construct
GQKHTVDLTHHFHFRGNRVTEVRVHIRVLTPSPLFLERGQDVAAQAAEAEALRAAAAGAPASLSEEQIRQFLRRFYEALDSGDADTAASLFHPGVTIHLWDGVTFTSREEFREWFERLFSTSKDAWREIKSLEVRGDTVEVHVQLHFTLN

SEQ ID NO: 1421 - protein, 150 aa, synthetic construct
GQKHTVDLTHHFHFRGNRVTEVRVHIRVLTPSPLFEALGQDEAALAAEARALRAADAGRPASLSEEQIRQFLRRFYEALDSGDADTAASLFHPGVTIHLWDGVTFTSREEFREWFERLFSTSKDAWREIKSLEVRGDTVEVHVQLHFTLN

SEQ ID NO: 1422 - protein, 150 aa, synthetic construct
GQKHTVDLTHHFHFRGNRVTEVRVHIRWLTPSPLLLALGERYEELAAEARALREADAGRPASLSEEQIRQFLRRFYEALDSGDADTAASLFHPGVTIHLWDGVTFTSREEFREWFERLFSTSKDAWREIKSLEVRGDTVEVHVQLHFTLN

SEQ ID NO: 1423 - protein, 151 aa, synthetic construct
GQKHTVDLTHHFHFRGNRVTEVRVHINPTVEDEEELEEALEEALELALEALEELLEEGGGGPPMSEEQIRQFLRRFYEALDSGDADTAASLFHPGVTIHLWDGVTFTSREEFREWFERLFSTSKDAWREIKSLEVRGDTVEVHVQLHFTLN

SEQ ID NO: 1424 - protein, 151 aa, synthetic construct
GQKHTVDLTHHFHFRGNRVTEVRVHIFEAPSEEAIPETAAKSLALMREILEAELARRGGGPPSISEEQIRQFLRRFYEALDSGDADTAASLFHPGVTIHLWDGVTFTSREEFREWFERLFSTSKDAWREIKSLEVRGDTVEVHVQLHFTLN

SEQ ID NO: 1425 - protein, 151 aa, synthetic construct
GQKHTVDLTHHFHFRGNRVTEVRVHIVEVPSEEAIPEAEAESLERMREILEAEERRRGGGPPSISEEQIRQFLRRFYEALDSGDADTAASLFHPGVTIHLWDGVTFTSREEFREWFERLFSTSKDAWREIKSLEVRGDTVEVHVQLHFTLN

SEQ ID NO: 1426 - protein, 151 aa, synthetic construct
GQKHTVDLTHHFHFRGNRVTEVRVHIIEAESEEEIPAVTAESLALMAEILAAEEARRGGGPPSISEEQIRQFLRRFYEALDSGDADTAASLFHPGVTIHLWDGVTFTSREEFREWFERLFSTSKDAWREIKSLEVRGDTVEVHVQLHFTLN

SEQ ID NO: 1427 - protein, 151 aa, synthetic construct
GQKHTVDLTHHFHFRGNRVTEVRVHIIESPSEAAIPETTAESLALMEEILAAEAARRGGGPPSISEEQIRQFLRRFYEALDSGDADTAASLFHPGVTIHLWDGVTFTSREEFREWFERLFSTSKDAWREIKSLEVRGDTVEVHVQLHFTLN

SEQ ID NO: 1428 - protein, 151 aa, synthetic construct
GQKHTVDLTHHFHFRGNRVTEVRVHIIESPSEAAIPETTARSLALRRAILEEELARRGGGPPSVSEEQIRQFLRRFYEALDSGDADTAASLFHPGVTIHLWDGVTFTSREEFREWFERLFSTSKDAWREIKSLEVRGDTVEVHVQLHFTLN

SEQ ID NO: 1429 - protein, 151 aa, synthetic construct
GQKHTVDLTHHFHFRGNRVTEVRVHIFESPSEEAIPETEARSLARMREILAAALAARGGGPPSVSEEQIRQFLRRFYEALDSGDADTAASLFHPGVTIHLWDGVTFTSREEFREWFERLFSTSKDAWREIKSLEVRGDTVEVHVQLHFTLN

SEQ ID NO: 1430 - protein, 151 aa, synthetic construct
GQKHTVDLTHHFHFRGNRVTEVRVHIIEVPSEEAAPEAQAQSLALAAEILAAAEARRGGGPPSLSEEQIRQFLRRFYEALDSGDADTAASLFHPGVTIHLWDGVTFTSREEFREWFERLFSTSKDAWREIKSLEVRGDTVEVHVQLHFTLN

SEQ ID NO: 1431 - protein, 151 aa, synthetic construct
GQKHTVDLTHHFHFRGNRVTEVRVHIFVSPDEAAIPETAARSAARMAEIAAAEAAREGGGPPSISEEQIRQFLRRFYEALDSGDADTAASLFHPGVTIHLWDGVTFTSREEFREWFERLFSTSKDAWREIKSLEVRGDTVEVHVQLHFTLN

SEQ ID NO: 1432 - protein, 151 aa, synthetic construct
GQKHTVDLTHHFHFRGNRVTEVRVHIVEVPSEEAAPAAAAESLALMREILAAELARRGGGPPSISEEQIRQFLRRFYEALDSGDADTAASLFHPGVTIHLWDGVTFTSREEFREWFERLFSTSKDAWREIKSLEVRGDTVEVHVQLHFTLN

SEQ ID NO: 1433 - protein, 151 aa, synthetic construct
GQKHTVDLTHHFHFRGNRVTEVRVHIFESASEADIEATTARSLARQREILAAEEARRGGGPPSISEEQIRQFLRRFYEALDSGDADTAASLFHPGVTIHLWDGVTFTSREEFREWFERLFSTSKDAWREIKSLEVRGDTVEVHVQLHFTLN

SEQ ID NO: 1434 - protein, 151 aa, synthetic construct
GQKHTVDLTHHFHFRGNRVTEVRVHIIEVPSEEAVPEATARSLALMREILAAALAERGGGPPSISEEQIRQFLRRFYEALDSGDADTAASLFHPGVTIHLWDGVTFTSREEFREWFERLFSTSKDAWREIKSLEVRGDTVEVHVQLHFTLN

SEQ ID NO: 1435 - protein, 151 aa, synthetic construct
GQKHTVDLTHHFHFRGNRVTEVRVHIVEAASEADVEAATAESLALAREILEAELARRGGGPPSISEEQIRQFLRRFYEALDSGDADTAASLFHPGVTIHLWDGVTFTSREEFREWFERLFSTSKDAWREIKSLEVRGDTVEVHVQLHFTLN

SEQ ID NO: 1436 - protein, 151 aa, synthetic construct
GQKHTVDLTHHFHFRGNRVTEVRVHIVVSPSEEAVPETAARTAALAREILAAALAERGGGPPSISEEQIRQFLRRFYEALDSGDADTAASLFHPGVTIHLWDGVTFTSREEFREWFERLFSTSKDAWREIKSLEVRGDTVEVHVQLHFTLN

SEQ ID NO: 1437 - protein, 151 aa, synthetic construct
GQKHTVDLTHHFHFRGNRVTEVRVHIVEAASEADVPAVTAESLALMREILAAEEARRGGGAPSISEEQIRQFLRRFYEALDSGDADTAASLFHPGVTIHLWDGVTFTSREEFREWFERLFSTSKDAWREIKSLEVRGDTVEVHVQLHFTLN

SEQ ID NO: 1438 - protein, 151 aa, synthetic construct
GQKHTVDLTHHFHFRGNRVTEVRVHIVESASEADVPETAARSAALMAEILAAELAREGGGPPSLSEEQIRQFLRRFYEALDSGDADTAASLFHPGVTIHLWDGVTFTSREEFREWFERLFSTSKDAWREIKSLEVRGDTVEVHVQLHFTLN

SEQ ID NO: 1439 - protein, 151 aa, synthetic construct
GQKHTVDLTHHFHFRGNRVTEVRVHIIEVESEEEAPEAEAQSLELMREILAAELARRGGGPPSISEEQIRQFLRRFYEALDSGDADTAASLFHPGVTIHLWDGVTFTSREEFREWFERLFSTSKDAWREIKSLEVRGDTVEVHVQLHFTLN

SEQ ID NO: 1440 - protein, 151 aa, synthetic construct
GQKHTVDLTHHFHFRGNRVTEVRVHIVEVPSEEALPEATARSLARMRAILEAALAERGGGPPSLSEEQIRQFLRRFYEALDSGDADTAASLFHPGVTIHLWDGVTFTSREEFREWFERLFSTSKDAWREIKSLEVRGDTVEVHVQLHFTLN

SEQ ID NO: 1441 - protein, 151 aa, synthetic construct
GQKHTVDLTHHFHFRGNRVTEVRVHIIEVESEEKIPEAAAESAALMAEILAAAEAREGGGPPSISEEQIRQFLRRFYEALDSGDADTAASLFHPGVTIHLWDGVTFTSREEFREWFERLFSTSKDAWREIKSLEVRGDTVEVHVQLHFTLN

SEQ ID NO: 1442 - protein, 151 aa, synthetic construct
GQKHTVDLTHHFHFRGNRVTEVRVHIFEAPSEEAIPEVTARSLALMAEILAAEEAREGGGPPSVSEEQIRQFLRRFYEALDSGDADTAASLFHPGVTIHLWDGVTFTSREEFREWFERLFSTSKDAWREIKSLEVRGDTVEVHVQLHFTLN

SEQ ID NO: 1443 - protein, 151 aa, synthetic construct
GQKHTVDLTHHFHFRGNRVTEVRVHIIEAPSEEAIPETAARAEALRAEILAAALAREGGGAPSISEEQIRQFLRRFYEALDSGDADTAASLFHPGVTIHLWDGVTFTSREEFREWFERLFSTSKDAWREIKSLEVRGDTVEVHVQLHFTLN

SEQ ID NO: 1444 - protein, 152 aa, synthetic construct
GQKHTVDLTHHFHFRGNRVTEVRVHINPTVEDEEELEEALERALELALELLRELLAEEAAGGPPMSEEQIRQFLRRFYEALDSGDADTAASLFHPGVTIHLWDGVTFTSREEFREWFERLFSTSKDAWREIKSLEVRGDTVEVHVQLHFTLN

SEQ ID NO: 1445 - protein, 152 aa, synthetic construct
GQKHTVDLTHHFHFRGNRVTEVRVHIIPVPSEEKLEEALARSRELARRILEETLARRGAGGPPEISEEQIRQFLRRFYEALDSGDADTAASLFHPGVTIHLWDGVTFTSREEFREWFERLFSTSKDAWREIKSLEVRGDTVEVHVQLHFTLN

SEQ ID NO: 1446 - protein, 152 aa, synthetic construct
GQKHTVDLTHHFHFRGNRVTEVRVHILPVESEEKLPEALARTRELARRILAERLAERGRGGPPTISEEQIRQFLRRFYEALDSGDADTAASLFHPGVTIHLWDGVTFTSREEFREWFERLFSTSKDAWREIKSLEVRGDTVEVHVQLHFTLN

SEQ ID NO: 1447 - protein, 152 aa, synthetic construct
GQKHTVDLTHHFHFRGNRVTEVRVHILPVPSEEELEAALARVRELAAAVLAETLAERGAGGAPEISEEQIRQFLRRFYEALDSGDADTAASLFHPGVTIHLWDGVTFTSREEFREWFERLFSTSKDAWREIKSLEVRGDTVEVHVQLHFTLN

SEQ ID NO: 1448 - protein, 152 aa, synthetic construct
GQKHTVDLTHHFHFRGNRVTEVRVHILPVPSEEDLPAVLARVEELARRRLAEELARRGAGGPAEISEEQIRQFLRRFYEALDSGDADTAASLFHPGVTIHLWDGVTFTSREEFREWFERLFSTSKDAWREIKSLEVRGDTVEVHVQLHFTLN

SEQ ID NO: 1449 - protein, 152 aa, synthetic construct
GQKHTVDLTHHFHFRGNRVTEVRVHIIPVASEEELPAALAEGERLAREVLERTLAERGEGGPPEISEEQIRQFLRRFYEALDSGDADTAASLFHPGVTIHLWDGVTFTSREEFREWFERLFSTSKDAWREIKSLEVRGDTVEVHVQLHFTLN

SEQ ID NO: 1450 - protein, 152 aa, synthetic construct
GQKHTVDLTHHFHFRGNRVTEVRVHILPVPSEAELPAALARTRALARAVLAETLAERGAGGPPTISEEQIRQFLRRFYEALDSGDADTAASLFHPGVTIHLWDGVTFTSREEFREWFERLFSTSKDAWREIKSLEVRGDTVEVHVQLHFTLN

SEQ ID NO: 1451 - protein, 152 aa, synthetic construct
GQKHTVDLTHHFHFRGNRVTEVRVHILPVPSEAEAPAAAARTRALAAAVLATRLAERGAGGPPTISEEQIRQFLRRFYEALDSGDADTAASLFHPGVTIHLWDGVTFTSREEFREWFERLFSTSKDAWREIKSLEVRGDTVEVHVQLHFTLN

SEQ ID NO: 1452 - protein, 152 aa, synthetic construct
GQKHTVDLTHHFHFRGNRVTEVRVHILPVPSEAELPAVLARGLELARRILAERLARLGEGAPPEISEEQIRQFLRRFYEALDSGDADTAASLFHPGVTIHLWDGVTFTSREEFREWFERLFSTSKDAWREIKSLEVRGDTVEVHVQLHFTLN

SEQ ID NO: 1453 - protein, 152 aa, synthetic construct
GQKHTVDLTHHFHFRGNRVTEVRVHILPVPSEAELPAALARVRELAERILAETLAERGAGAPPTISEEQIRQFLRRFYEALDSGDADTAASLFHPGVTIHLWDGVTFTSREEFREWFERLFSTSKDAWREIKSLEVRGDTVEVHVQLHFTLN

SEQ ID NO: 1454 - protein, 152 aa, synthetic construct
GQKHTVDLTHHFHFRGNRVTEVRVHILPVESEEKLEEVLAETRELARRVLEETLAERGEGGPPEISEEQIRQFLRRFYEALDSGDADTAASLFHPGVTIHLWDGVTFTSREEFREWFERLFSTSKDAWREIKSLEVRGDTVEVHVQLHFTLN

SEQ ID NO: 1455 - protein, 152 aa, synthetic construct
GQKHTVDLTHHFHFRGNRVTEVRVHILPVPSEEEAEAVAAQGRELARRILEEELARRGAGAPPTISEEQIRQFLRRFYEALDSGDADTAASLFHPGVTIHLWDGVTFTSREEFREWFERLFSTSKDAWREIKSLEVRGDTVEVHVQLHFTLN

SEQ ID NO: 1456 - protein, 152 aa, synthetic construct
GQKHTVDLTHHFHFRGNRVTEVRVHILPVPSEEKLEEALARTLELARRILEETLAERGEGAPPEISEEQIRQFLRRFYEALDSGDADTAASLFHPGVTIHLWDGVTFTSREEFREWFERLFSTSKDAWREIKSLEVRGDTVEVHVQLHFTLN

SEQ ID NO: 1457 - protein, 152 aa, synthetic construct
GQKHTVDLTHHFHFRGNRVTEVRVHILPVPSEEELPAALARTEALARRVLAETLAERGAGAPPTISEEQIRQFLRRFYEALDSGDADTAASLFHPGVTIHLWDGVTFTSREEFREWFERLFSTSKDAWREIKSLEVRGDTVEVHVQLHFTLN

SEQ ID NO: 1458 - protein, 152 aa, synthetic construct
GQKHTVDLTHHFHFRGNRVTEVRVHILPVASEEELPAALAEVRALAAERLAATLAERGAGAPATISEEQIRQFLRRFYEALDSGDADTAASLFHPGVTIHLWDGVTFTSREEFREWFERLFSTSKDAWREIKSLEVRGDTVEVHVQLHFTLN

SEQ ID NO: 1459 - protein, 152 aa, synthetic construct
GQKHTVDLTHHFHFRGNRVTEVRVHILPVESEEELPAALAETEALARRILEEELARRGAGAPPTISEEQIRQFLRRFYEALDSGDADTAASLFHPGVTIHLWDGVTFTSREEFREWFERLFSTSKDAWREIKSLEVRGDTVEVHVQLHFTLN

SEQ ID NO: 1460 - protein, 152 aa, synthetic construct
GQKHTVDLTHHFHFRGNRVTEVRVHILPVPSEADLEAALARSAALARAVLAEELARRGAGGAPEISEEQIRQFLRRFYEALDSGDADTAASLFHPGVTIHLWDGVTFTSREEFREWFERLFSTSKDAWREIKSLEVRGDTVEVHVQLHFTLN

SEQ ID NO: 1461 - protein, 152 aa, synthetic construct
GQKHTVDLTHHFHFRGNRVTEVRVHILPVPSEEELPAVLAEGLALARRVLEETLAERGAGGPPTISEEQIRQFLRRFYEALDSGDADTAASLFHPGVTIHLWDGVTFTSREEFREWFERLFSTSKDAWREIKSLEVRGDTVEVHVQLHFTLN

SEQ ID NO: 1462 - protein, 152 aa, synthetic construct
GQKHTVDLTHHFHFRGNRVTEVRVHIIPVESEEELEAALARGLELARRRLAEELARLGAGGPPTISEEQIRQFLRRFYEALDSGDADTAASLFHPGVTIHLWDGVTFTSREEFREWFERLFSTSKDAWREIKSLEVRGDTVEVHVQLHFTLN

SEQ ID NO: 1463 - protein, 152 aa, synthetic construct
GQKHTVDLTHHFHFRGNRVTEVRVHILPVASEEEAPAAAARVLELARRVLEETLAERGAGGPASISEEQIRQFLRRFYEALDSGDADTAASLFHPGVTIHLWDGVTFTSREEFREWFERLFSTSKDAWREIKSLEVRGDTVEVHVQLHFTLN

SEQ ID NO: 1464 - protein, 152 aa, synthetic construct
GQKHTVDLTHHFHFRGNRVTEVRVHILPVPSEEEAEAAAARTRALAARILAEELARLGAGAPPTISEEQIRQFLRRFYEALDSGDADTAASLFHPGVTIHLWDGVTFTSREEFREWFERLFSTSKDAWREIKSLEVRGDTVEVHVQLHFTLN

SEQ ID NO: 1465 - protein, 153 aa, synthetic construct
GQKHTVDLTHHFHFRGNRVTEVRVHINPTVPDEDLEEALEAALELLAALLALLLLLLLLLLLGPPMSEEQIRQFLRRFYEALDSGDADTAASLFHPGVTIHLWDGVTFTSREEFREWFERLFSTSKDAWREIKSLEVRGDTVEVHVQLHFTLN

SEQ ID NO: 1466 - protein, 153 aa, synthetic construct
GQKHTVDLTHHFHFRGNRVTEVRVHIHEVPSTDPEDALRLFEERWAADRAEFAAEYAARAGGPAQISEEQIRQFLRRFYEALDSGDADTAASLFHPGVTIHLWDGVTFTSREEFREWFERLFSTSKDAWREIKSLEVRGDTVEVHVQLHFTLN

SEQ ID NO: 1467 - protein, 153 aa, synthetic construct
GQKHTVDLTHHFHFRGNRVTEVRVHITEVPTTDPADAAALNARNWEKERAAFAEEYAARAGGPAEISEEQIRQFLRRFYEALDSGDADTAASLFHPGVTIHLWDGVTFTSREEFREWFERLFSTSKDAWREIKSLEVRGDTVEVHVQLHFTLN

SEQ ID NO: 1468 - protein, 153 aa, synthetic construct
GQKHTVDLTHHFHFRGNRVTEVRVHIHEVPTTDPADALALAEELWARDRAEFAAEYAARSGGPAEISEEQIRQFLRRFYEALDSGDADTAASLFHPGVTIHLWDGVTFTSREEFREWFERLFSTSKDAWREIKSLEVRGDTVEVHVQLHFTLN

SEQ ID NO: 1469 - protein, 153 aa, synthetic construct
GQKHTVDLTHHFHFRGNRVTEVRVHITEVPTTDPADAAALFEENWARERARFAEEYAARAGGPASISEEQIRQFLRRFYEALDSGDADTAASLFHPGVTIHLWDGVTFTSREEFREWFERLFSTSKDAWREIKSLEVRGDTVEVHVQLHFTLN

SEQ ID NO: 1470 - protein, 153 aa, synthetic construct
GQKHTVDLTHHFHFRGNRVTEVRVHIHEVPTTDPADAAALFERRWAEDRAAFDAEYAARSGGPAEISEEQIRQFLRRFYEALDSGDADTAASLFHPGVTIHLWDGVTFTSREEFREWFERLFSTSKDAWREIKSLEVRGDTVEVHVQLHFTLN

SEQ ID NO: 1471 - protein, 153 aa, synthetic construct
GQKHTVDLTHHFHFRGNRVTEVRVHIHEVPTTEPEDALALFERRWAEDRAAFAEEYAARAGGPATISEEQIRQFLRRFYEALDSGDADTAASLFHPGVTIHLWDGVTFTSREEFREWFERLFSTSKDAWREIKSLEVRGDTVEVHVQLHFTLN

SEQ ID NO: 1472 - protein, 153 aa, synthetic construct
GQKHTVDLTHHFHFRGNRVTEVRVHIREVPSTDPADAAALNEENWARDRAAFDAEYAARAGGPAEISEEQIRQFLRRFYEALDSGDADTAASLFHPGVTIHLWDGVTFTSREEFREWFERLFSTSKDAWREIKSLEVRGDTVEVHVQLHFTLN

SEQ ID NO: 1473 - protein, 153 aa, synthetic construct
GQKHTVDLTHHFHFRGNRVTEVRVHIHENPTTDPATAEALNAELWARDRAEFAEEYAARAGGPAEISEEQIRQFLRRFYEALDSGDADTAASLFHPGVTIHLWDGVTFTSREEFREWFERLFSTSKDAWREIKSLEVRGDTVEVHVQLHFTLN

SEQ ID NO: 1474 - protein, 153 aa, synthetic construct
GQKHTVDLTHHFHFRGNRVTEVRVHIYEVPTTDPADAEALFEKRWEEDRAEFDEEYAARSGGPAEISEEQIRQFLRRFYEALDSGDADTAASLFHPGVTIHLWDGVTFTSREEFREWFERLFSTSKDAWREIKSLEVRGDTVEVHVQLHFTLN

SEQ ID NO: 1475 - protein, 153 aa, synthetic construct
GQKHTVDLTHHFHFRGNRVTEVRVHIHEVPTTDPAAAEALAAELWARDRAAFAEEYAARSGGPATISEEQIRQFLRRFYEALDSGDADTAASLFHPGVTIHLWDGVTFTSREEFREWFERLFSTSKDAWREIKSLEVRGDTVEVHVQLHFTLN

SEQ ID NO: 1476 - protein, 153 aa, synthetic construct
GQKHTVDLTHHFHFRGNRVTEVRVHITEVPTTEEADALALFEENWERNRAAFAAEYAERAGGPAEISEEQIRQFLRRFYEALDSGDADTAASLFHPGVTIHLWDGVTFTSREEFREWFERLFSTSKDAWREIKSLEVRGDTVEVHVQLHFTLN

SEQ ID NO: 1477 - protein, 153 aa, synthetic construct
GQKHTVDLTHHFHFRGNRVTEVRVHIHEVPTTDPADARALNERRWAEERARFAEEYAARAGGPATISEEQIRQFLRRFYEALDSGDADTAASLFHPGVTIHLWDGVTFTSREEFREWFERLFSTSKDAWREIKSLEVRGDTVEVHVQLHFTLN

SEQ ID NO: 1478 - protein, 153 aa, synthetic construct
GQKHTVDLTHHFHFRGNRVTEVRVHIREVPTTDPADAEALFEENWERERAAFAEEYAARAGGPASISEEQIRQFLRRFYEALDSGDADTAASLFHPGVTIHLWDGVTFTSREEFREWFERLFSTSKDAWREIKSLEVRGDTVEVHVQLHFTLN

SEQ ID NO: 1479 - protein, 153 aa, synthetic construct
GQKHTVDLTHHFHFRGNRVTEVRVHIHEVPTTDPAAAAALFEELWARSRAEFDEEYAARSGGPASISEEQIRQFLRRFYEALDSGDADTAASLFHPGVTIHLWDGVTFTSREEFREWFERLFSTSKDAWREIKSLEVRGDTVEVHVQLHFTLN

SEQ ID NO: 1480 - protein, 153 aa, synthetic construct
GQKHTVDLTHHFHFRGNRVTEVRVHIHEVPTTDPEDALALNEELWARDRAAFDAEYARRSGGPATISEEQIRQFLRRFYEALDSGDADTAASLFHPGVTIHLWDGVTFTSREEFREWFERLFSTSKDAWREIKSLEVRGDTVEVHVQLHFTLN

SEQ ID NO: 1481 - protein, 153 aa, synthetic construct
GQKHTVDLTHHFHFRGNRVTEVRVHIYECPTTDPADAEALFEKRWAEDRERFAAEYAERSGGPAEISEEQIRQFLRRFYEALDSGDADTAASLFHPGVTIHLWDGVTFTSREEFREWFERLFSTSKDAWREIKSLEVRGDTVEVHVQLHFTLN

SEQ ID NO: 1482 - protein, 153 aa, synthetic construct
GQKHTVDLTHHFHFRGNRVTEVRVHIREVPTTDPADAEALFEENWARDRAAFDEEYAARAGGPATISEEQIRQFLRRFYEALDSGDADTAASLFHPGVTIHLWDGVTFTSREEFREWFERLFSTSKDAWREIKSLEVRGDTVEVHVQLHFTLN

SEQ ID NO: 1483 - protein, 153 aa, synthetic construct
GQKHTVDLTHHFHFRGNRVTEVRVHIYEVPTTEPEDAERLFEERWEEDRAEFDAEYAARSGGPATISEEQIRQFLRRFYEALDSGDADTAASLFHPGVTIHLWDGVTFTSREEFREWFERLFSTSKDAWREIKSLEVRGDTVEVHVQLHFTLN

SEQ ID NO: 1484 - protein, 153 aa, synthetic construct
GQKHTVDLTHHFHFRGNRVTEVRVHIYECPTTDPEAAEALFEERWAEDRAAFAEEYAARSGGPASISEEQIRQFLRRFYEALDSGDADTAASLFHPGVTIHLWDGVTFTSREEFREWFERLFSTSKDAWREIKSLEVRGDTVEVHVQLHFTLN

SEQ ID NO: 1485 - protein, 153 aa, synthetic construct
GQKHTVDLTHHFHFRGNRVTEVRVHIRVVPTTDPADAEALFAENWARDRAEFDAEYAARSGGPAEISEEQIRQFLRRFYEALDSGDADTAASLFHPGVTIHLWDGVTFTSREEFREWFERLFSTSKDAWREIKSLEVRGDTVEVHVQLHFTLN

SEQ ID NO: 1486 - protein, 154 aa, synthetic construct
GQKHTVDLTHHFHFRGNRVTEVRVHINPTVEEDEELLELLLLLLLLLLLELLELLLLLLELLGGPPMSEEQIRQFLRRFYEALDSGDADTAASLFHPGVTIHLWDGVTFTSREEFREWFERLFSTSKDAWREIKSLEVRGDTVEVHVQLHFTLN

SEQ ID NO: 1487 - protein, 154 aa, synthetic construct
GQKHTVDLTHHFHFRGNRVTEVRVHILPVTPSAGLEALLADLAARQRAAVEAIRAEMAAVAGRPASISEEQIRQFLRRFYEALDSGDADTAASLFHPGVTIHLWDGVTFTSREEFREWFERLFSTSKDAWREIKSLEVRGDTVEVHVQLHFTLN

SEQ ID NO: 1488 - protein, 154 aa, synthetic construct
GQKHTVDLTHHFHFRGNRVTEVRVHILPVEPSEGCAACLAEREAEQRAAVEEIRAEFAAVAGEPASISEEQIRQFLRRFYEALDSGDADTAASLFHPGVTIHLWDGVTFTSREEFREWFERLFSTSKDAWREIKSLEVRGDTVEVHVQLHFTLN

SEQ ID NO: 1489 - protein, 154 aa, synthetic construct
GQKHTVDLTHHFHFRGNRVTEVRVHIRPVTPSAALEALLATLAAEQEAAIAEIRAEMAAVAGRPASISEEQIRQFLRRFYEALDSGDADTAASLFHPGVTIHLWDGVTFTSREEFREWFERLFSTSKDAWREIKSLEVRGDTVEVHVQLHFTLN

SEQ ID NO: 1490 - protein, 154 aa, synthetic construct
GQKHTVDLTHHFHFRGNRVTEVRVHIKPIEPSEGLEALLKELQAEQEAAVAEIRAEMEAVAGEPASISEEQIRQFLRRFYEALDSGDADTAASLFHPGVTIHLWDGVTFTSREEFREWFERLFSTSKDAWREIKSLEVRGDTVEVHVQLHFTLN

SEQ ID NO: 1491 - protein, 154 aa, synthetic construct
GQKHTVDLTHHFHFRGNRVTEVRVHILPVTPSESLAALLAELEARQRAAVEEVRAAFEAVRGRPASISEEQIRQFLRRFYEALDSGDADTAASLFHPGVTIHLWDGVTFTSREEFREWFERLFSTSKDAWREIKSLEVRGDTVEVHVQLHFTLN

SEQ ID NO: 1492 - protein, 154 aa, synthetic construct
GQKHTVDLTHHFHFRGNRVTEVRVHIRPVEPSAACEACLAELRARQEAGIEEIRAEMAAVAGAPASISEEQIRQFLRRFYEALDSGDADTAASLFHPGVTIHLWDGVTFTSREEFREWFERLFSTSKDAWREIKSLEVRGDTVEVHVQLHFTLN

SEQ ID NO: 1493 - protein, 154 aa, synthetic construct
GQKHTVDLTHHFHFRGNRVTEVRVHIRPVEPSEPLAALLAELAARQAAAVEEMRAAFEAVAGRPASISEEQIRQFLRRFYEALDSGDADTAASLFHPGVTIHLWDGVTFTSREEFREWFERLFSTSKDAWREIKSLEVRGDTVEVHVQLHFTLN

SEQ ID NO: 1494 - protein, 154 aa, synthetic construct
GQKHTVDLTHHFHFRGNRVTEVRVHITPVTPSEGLAALLAELEARQRAGREEIRAEMEAVRGRPASISEEQIRQFLRRFYEALDSGDADTAASLFHPGVTIHLWDGVTFTSREEFREWFERLFSTSKDAWREIKSLEVRGDTVEVHVQLHFTLN

SEQ ID NO: 1495 - protein, 154 aa, synthetic construct
GQKHTVDLTHHFHFRGNRVTEVRVHILPVEPSEPLSALLAELAARQRAAVEEVRAEMAAVAGAPASISEEQIRQFLRRFYEALDSGDADTAASLFHPGVTIHLWDGVTFTSREEFREWFERLFSTSKDAWREIKSLEVRGDTVEVHVQLHFTLN

SEQ ID NO: 1496 - protein, 154 aa, synthetic construct
GQKHTVDLTHHFHFRGNRVTEVRVHIRPVEPSAGLAALLSELAAEQAAAIEALRAEMAAVAGRPASISEEQIRQFLRRFYEALDSGDADTAASLFHPGVTIHLWDGVTFTSREEFREWFERLFSTSKDAWREIKSLEVRGDTVEVHVQLHFTLN

SEQ ID NO: 1497 - protein, 154 aa, synthetic construct
GQKHTVDLTHHFHFRGNRVTEVRVHIRPVTPSEGLAALLAELEAEQAARVEEIRAAMEAVRGAPASISEEQIRQFLRRFYEALDSGDADTAASLFHPGVTIHLWDGVTFTSREEFREWFERLFSTSKDAWREIKSLEVRGDTVEVHVQLHFTLN

SEQ ID NO: 1498 - protein, 154 aa, synthetic construct
GQKHTVDLTHHFHFRGNRVTEVRVHIREVTPSAACSACLDALQAQQAAAIEEVRAAMAAVAGRPASISEEQIRQFLRRFYEALDSGDADTAASLFHPGVTIHLWDGVTFTSREEFREWFERLFSTSKDAWREIKSLEVRGDTVEVHVQLHFTLN

SEQ ID NO: 1499 - protein, 154 aa, synthetic construct
GQKHTVDLTHHFHFRGNRVTEVRVHIAPVTPSEGCAACLATLAAAQAAAREEVAAEMEAVRGRPASISEEQIRQFLRRFYEALDSGDADTAASLFHPGVTIHLWDGVTFTSREEFREWFERLFSTSKDAWREIKSLEVRGDTVEVHVQLHFTLN

SEQ ID NO: 1500 - protein, 154 aa, synthetic construct
GQKHTVDLTHHFHFRGNRVTEVRVHILPVEPSAGCEACLAEREAEQRAAVEELRAAFAAVAGEPASISEEQIRQFLRRFYEALDSGDADTAASLFHPGVTIHLWDGVTFTSREEFREWFERLFSTSKDAWREIKSLEVRGDTVEVHVQLHFTLN

SEQ ID NO: 1501 - protein, 154 aa, synthetic construct
GQKHTVDLTHHFHFRGNRVTEVRVHIRPVTPSEPLEALLAERAAEQEAGIAEIRAEMEAVAGRPASISEEQIRQFLRRFYEALDSGDADTAASLFHPGVTIHLWDGVTFTSREEFREWFERLFSTSKDAWREIKSLEVRGDTVEVHVQLHFTLN

SEQ ID NO: 1502 - protein, 154 aa, synthetic construct
GQKHTVDLTHHFHFRGNRVTEVRVHIRPVTPSEPLAALLADLQAAQDAAIAEIRAEMAAVAGRPASISEEQIRQFLRRFYEALDSGDADTAASLFHPGVTIHLWDGVTFTSREEFREWFERLFSTSKDAWREIKSLEVRGDTVEVHVQLHFTLN

SEQ ID NO: 1503 - protein, 154 aa, synthetic construct
GQKHTVDLTHHFHFRGNRVTEVRVHILPVEPSEACAACLAELQAAQEAAVAELRAAFEAVAGRPASISEEQIRQFLRRFYEALDSGDADTAASLFHPGVTIHLWDGVTFTSREEFREWFERLFSTSKDAWREIKSLEVRGDTVEVHVQLHFTLN

SEQ ID NO: 1504 - protein, 154 aa, synthetic construct
GQKHTVDLTHHFHFRGNRVTEVRVHIRPVEPSEGCQACLATLQAEQDAAVAEIAAAMAAVAGAPASISEEQIRQFLRRFYEALDSGDADTAASLFHPGVTIHLWDGVTFTSREEFREWFERLFSTSKDAWREIKSLEVRGDTVEVHVQLHFTLN

SEQ ID NO: 1505 - protein, 154 aa, synthetic construct
GQKHTVDLTHHFHFRGNRVTEVRVHILLKEPSEELEKLLKELQAKQKAAVEEIRAEMEAVRGRPASISEEQIRQFLRRFYEALDSGDADTAASLFHPGVTIHLWDGVTFTSREEFREWFERLFSTSKDAWREIKSLEVRGDTVEVHVQLHFTLN

SEQ ID NO: 1506 - protein, 154 aa, synthetic construct
GQKHTVDLTHHFHFRGNRVTEVRVHIRPVTPSAGCEACLASLQAEQAAAIEEIRAAMAAVAGAPASISEEQIRQFLRRFYEALDSGDADTAASLFHPGVTIHLWDGVTFTSREEFREWFERLFSTSKDAWREIKSLEVRGDTVEVHVQLHFTLN

SEQ ID NO: 1507 - protein, 155 aa, synthetic construct
GQKHTVDLTHHFHFRGNRVTEVRVHINPTVDGDPEERELLLLLLLLLLLLLLLLLLLLLLLELEGPPMSEEQIRQFLRRFYEALDSGDADTAASLFHPGVTIHLWDGVTFTSREEFREWFERLFSTSKDAWREIKSLEVRGDTVEVHVQLHFTLN

SEQ ID NO: 1508 - protein, 155 aa, synthetic construct
GQKHTVDLTHHFHFRGNRVTEVRVHIRPVTPNPFVVSLLAGRAREAAEAEEAALREALRRETGGPASISEEQIRQFLRRFYEALDSGDADTAASLFHPGVTIHLWDGVTFTSREEFREWFERLFSTSKDAWREIKSLEVRGDTVEVHVQLHFTLN

SEQ ID NO: 1509 - protein, 155 aa, synthetic construct
GQKHTVDLTHHFHFRGNRVTEVRVHIVPLTPNPFVVSLLAGRAGERARRELEELRAELARRTGGPASISEEQIRQFLRRFYEALDSGDADTAASLFHPGVTIHLWDGVTFTSREEFREWFERLFSTSKDAWREIKSLEVRGDTVEVHVQLHFTLN

SEQ ID NO: 1510 - protein, 155 aa, synthetic construct
GQKHTVDLTHHFHFRGNRVTEVRVHIIPLTPNPAVVAALAGRGRAAAEAERAALSAALAAATGGPAEISEEQIRQFLRRFYEALDSGDADTAASLFHPGVTIHLWDGVTFTSREEFREWFERLFSTSKDAWREIKSLEVRGDTVEVHVQLHFTLN

SEQ ID NO: 1511 - protein, 155 aa, synthetic construct
GQKHTVDLTHHFHFRGNRVTEVRVHIIPKTPNPFVVSLLAGRAGARAEAELEALRAALRAETGGPASISEEQIRQFLRRFYEALDSGDADTAASLFHPGVTIHLWDGVTFTSREEFREWFERLFSTSKDAWREIKSLEVRGDTVEVHVQLHFTLN

SEQ ID NO: 1512 - protein, 155 aa, synthetic construct
GQKHTVDLTHHFHFRGNRVTEVRVHIRPLTPNPRVVSLLAGRAGEKAAEEIAALRAALRAETGGPASISEEQIRQFLRRFYEALDSGDADTAASLFHPGVTIHLWDGVTFTSREEFREWFERLFSTSKDAWREIKSLEVRGDTVEVHVQLHFTLN

SEQ ID NO: 1513 - protein, 155 aa, synthetic construct
GQKHTVDLTHHFHFRGNRVTEVRVHIRPLTPNPAVVEALAGRAGEEAAALEEELRAALRRETGGPASISEEQIRQFLRRFYEALDSGDADTAASLFHPGVTIHLWDGVTFTSREEFREWFERLFSTSKDAWREIKSLEVRGDTVEVHVQLHFTLN

SEQ ID NO: 1514 - protein, 155 aa, synthetic construct
GQKHTVDLTHHFHFRGNRVTEVRVHIRPLTPNPFVVELLAGRGREAAEAELAAERAALARETGGPASISEEQIRQFLRRFYEALDSGDADTAASLFHPGVTIHLWDGVTFTSREEFREWFERLFSTSKDAWREIKSLEVRGDTVEVHVQLHFTLN

SEQ ID NO: 1515 - protein, 155 aa, synthetic construct
GQKHTVDLTHHFHFRGNRVTEVRVHIRPLTPNPAVVSLLAGRAGAAAEAEEAALRAALAAETGGPASISEEQIRQFLRRFYEALDSGDADTAASLFHPGVTIHLWDGVTFTSREEFREWFERLFSTSKDAWREIKSLEVRGDTVEVHVQLHFTLN

SEQ ID NO: 1516 - protein, 155 aa, synthetic construct
GQKHTVDLTHHFHFRGNRVTEVRVHIVPLTPNPALVAALAGRAGAAAAAELAALRAALAAETGGPASISEEQIRQFLRRFYEALDSGDADTAASLFHPGVTIHLWDGVTFTSREEFREWFERLFSTSKDAWREIKSLEVRGDTVEVHVQLHFTLN

SEQ ID NO: 1517 - protein, 155 aa, synthetic construct
GQKHTVDLTHHFHFRGNRVTEVRVHIRPLTPNPYVVSLLAGRAGAEAEALLEAERAALRAETGGPASISEEQIRQFLRRFYEALDSGDADTAASLFHPGVTIHLWDGVTFTSREEFREWFERLFSTSKDAWREIKSLEVRGDTVEVHVQLHFTLN

SEQ ID NO: 1518 - protein, 155 aa, synthetic construct
GQKHTVDLTHHFHFRGNRVTEVRVHIRPVTPNPFVVSLLAGRAGEAEAAEREALRAALAAETGGPASISEEQIRQFLRRFYEALDSGDADTAASLFHPGVTIHLWDGVTFTSREEFREWFERLFSTSKDAWREIKSLEVRGDTVEVHVQLHFTLN

SEQ ID NO: 1519 - protein, 155 aa, synthetic construct
GQKHTVDLTHHFHFRGNRVTEVRVHIRPVTPNPRVVEALAGRAGERAEAELAALRAALAAETGGPAEISEEQIRQFLRRFYEALDSGDADTAASLFHPGVTIHLWDGVTFTSREEFREWFERLFSTSKDAWREIKSLEVRGDTVEVHVQLHFTLN

SEQ ID NO: 1520 - protein, 155 aa, synthetic construct
GQKHTVDLTHHFHFRGNRVTEVRVHIVPLTPNPFVVAALAGRGRAEAEALLAAERAALAAETGGPASISEEQIRQFLRRFYEALDSGDADTAASLFHPGVTIHLWDGVTFTSREEFREWFERLFSTSKDAWREIKSLEVRGDTVEVHVQLHFTLN

SEQ ID NO: 1521 - protein, 155 aa, synthetic construct
GQKHTVDLTHHFHFRGNRVTEVRVHIRPLTPNPFVTSLLAGRGREEEEALRAALRAALAAETGGPPSISEEQIRQFLRRFYEALDSGDADTAASLFHPGVTIHLWDGVTFTSREEFREWFERLFSTSKDAWREIKSLEVRGDTVEVHVQLHFTLN

SEQ ID NO: 1522 - protein, 155 aa, synthetic construct
GQKHTVDLTHHFHFRGNRVTEVRVHIRPLTPNPVVVAALAGRGREAAEAEEERLREELRRRTGGPASISEEQIRQFLRRFYEALDSGDADTAASLFHPGVTIHLWDGVTFTSREEFREWFERLFSTSKDAWREIKSLEVRGDTVEVHVQLHFTLN

SEQ ID NO: 1523 - protein, 155 aa, synthetic construct
GQKHTVDLTHHFHFRGNRVTEVRVHIIPLTPNPFIVELLAGRARERAEAERAALRAALAAETGGPASISEEQIRQFLRRFYEALDSGDADTAASLFHPGVTIHLWDGVTFTSREEFREWFERLFSTSKDAWREIKSLEVRGDTVEVHVQLHFTLN

SEQ ID NO: 1524 - protein, 155 aa, synthetic construct
GQKHTVDLTHHFHFRGNRVTEVRVHIRPVTPNPFVVSLLAGRAGEANEALLAEERAALRRATGGPASISEEQIRQFLRRFYEALDSGDADTAASLFHPGVTIHLWDGVTFTSREEFREWFERLFSTSKDAWREIKSLEVRGDTVEVHVQLHFTLN

SEQ ID NO: 1525 - protein, 155 aa, synthetic construct
GQKHTVDLTHHFHFRGNRVTEVRVHIRPVTPNPFVVSLLAGRAGAAAEAAIAEERAALREATGGPASISEEQIRQFLRRFYEALDSGDADTAASLFHPGVTIHLWDGVTFTSREEFREWFERLFSTSKDAWREIKSLEVRGDTVEVHVQLHFTLN

SEQ ID NO: 1526 - protein, 155 aa, synthetic construct
GQKHTVDLTHHFHFRGNRVTEVRVHIIPLTPNPAVVAALAGRAREEAEAERAALRAALAAETGGPATISEEQIRQFLRRFYEALDSGDADTAASLFHPGVTIHLWDGVTFTSREEFREWFERLFSTSKDAWREIKSLEVRGDTVEVHVQLHFTLN

SEQ ID NO: 1527 - protein, 155 aa, synthetic construct
GQKHTVDLTHHFHFRGNRVTEVRVHIRPLTENPFVVSLLAGRNRERAAALEEAERAALAAETGGPAEISEEQIRQFLRRFYEALDSGDADTAASLFHPGVTIHLWDGVTFTSREEFREWFERLFSTSKDAWREIKSLEVRGDTVEVHVQLHFTLN

SEQ ID NO: 1528 - protein, 156 aa, synthetic construct
GQKHTVDLTHHFHFRGNRVTEVRVHINPTVDGEEELLLLLLLLLLLLLLLLLLLLLLLLLLLLEGGPPMSEEQIRQFLRRFYEALDSGDADTAASLFHPGVTIHLWDGVTFTSREEFREWFERLFSTSKDAWREIKSLEVRGDTVEVHVQLHFTLN

SEQ ID NO: 1529 - protein, 156 aa, synthetic construct
GQKHTVDLTHHFHFRGNRVTEVRVHIEFLTPAEKLRELFAGTDYEGAARREAYRAEVRAALAAGGPPSLTEEQIRQFLRRFYEALDSGDADTAASLFHPGVTIHLWDGVTFTSREEFREWFERLFSTSKDAWREIKSLEVRGDTVEVHVQLHFTLN

SEQ ID NO: 1530 - protein, 156 aa, synthetic construct
GQKHTVDLTHHFHFRGNRVTEVRVHIRFLTPAEAARELHAGANYDGDARWEAFRAEARAALAAGGPPSLTEEQIRQFLRRFYEALDSGDADTAASLFHPGVTIHLWDGVTFTSREEFREWFERLFSTSKDAWREIKSLEVRGDTVEVHVQLHFTLN

SEQ ID NO: 1531 - protein, 156 aa, synthetic construct
GQKHTVDLTHHFHFRGNRVTEVRVHIRFLTPAEEARKLHAGADEEGDAAWAAFEAEARARLAAGGPPSLTEEQIRQFLRRFYEALDSGDADTAASLFHPGVTIHLWDGVTFTSREEFREWFERLFSTSKDAWREIKSLEVRGDTVEVHVQLHFTLN

SEQ ID NO: 1532 - protein, 156 aa, synthetic construct
GQKHTVDLTHHFHFRGNRVTEVRVHIRFLSPHDKALELHAGSTEAGEAAAEAFRAEARAALAAGGPPSLSEEQIRQFLRRFYEALDSGDADTAASLFHPGVTIHLWDGVTFTSREEFREWFERLFSTSKDAWREIKSLEVRGDTVEVHVQLHFTLN

SEQ ID NO: 1533 - protein, 156 aa, synthetic construct
GQKHTVDLTHHFHFRGNRVTEVRVHIHFLTPHTALAELHAGALEAGEAAREAYRAAVRAALAAGGPPSLSEEQIRQFLRRFYEALDSGDADTAASLFHPGVTIHLWDGVTFTSREEFREWFERLFSTSKDAWREIKSLEVRGDTVEVHVQLHFTLN

SEQ ID NO: 1534 - protein, 156 aa, synthetic construct
GQKHTVDLTHHFHFRGNRVTEVRVHIRFLTPADAALKLHAGANEAGEAAAEAFRAEARAALAAGGPPSLTEEQIRQFLRRFYEALDSGDADTAASLFHPGVTIHLWDGVTFTSREEFREWFERLFSTSKDAWREIKSLEVRGDTVEVHVQLHFTLN

SEQ ID NO: 1535 - protein, 156 aa, synthetic construct
GQKHTVDLTHHFHFRGNRVTEVRVHIRFLTPADKALELHKGANYEGDERWEAYRAEARAALAAGGPPSLSEEQIRQFLRRFYEALDSGDADTAASLFHPGVTIHLWDGVTFTSREEFREWFERLFSTSKDAWREIKSLEVRGDTVEVHVQLHFTLN

SEQ ID NO: 1536 - protein, 156 aa, synthetic construct
GQKHTVDLTHHFHFRGNRVTEVRVHIRFLTPADKLLELHAGATEAGDAAWEAYRAEVRAALAAGGPPSLSEEQIRQFLRRFYEALDSGDADTAASLFHPGVTIHLWDGVTFTSREEFREWFERLFSTSKDAWREIKSLEVRGDTVEVHVQLHFTLN

SEQ ID NO: 1537 - protein, 156 aa, synthetic construct
GQKHTVDLTHHFHFRGNRVTEVRVHIRFLTPADKALELHKGANYDGDERAEAFRAEARALLAAGGPPSLSEEQIRQFLRRFYEALDSGDADTAASLFHPGVTIHLWDGVTFTSREEFREWFERLFSTSKDAWREIKSLEVRGDTVEVHVQLHFTLN

SEQ ID NO: 1538 - protein, 156 aa, synthetic construct
GQKHTVDLTHHFHFRGNRVTEVRVHIRFLTPATKALELHAGANEEGDERWEAYRAEVRALLAAGGPPSLTEEQIRQFLRRFYEALDSGDADTAASLFHPGVTIHLWDGVTFTSREEFREWFERLFSTSKDAWREIKSLEVRGDTVEVHVQLHFTLN

SEQ ID NO: 1539 - protein, 156 aa, synthetic construct
GQKHTVDLTHHFHFRGNRVTEVRVHIRFLSPHTALLELHAGATEEGEARAEAYRAEARALLAAGGPPSLSEEQIRQFLRRFYEALDSGDADTAASLFHPGVTIHLWDGVTFTSREEFREWFERLFSTSKDAWREIKSLEVRGDTVEVHVQLHFTLN

SEQ ID NO: 1540 - protein, 156 aa, synthetic construct
GQKHTVDLTHHFHFRGNRVTEVRVHIRFLSPHDKLLELHAGTNYEGEARWAAYRAEVRALLAAGGPPSLSEEQIRQFLRRFYEALDSGDADTAASLFHPGVTIHLWDGVTFTSREEFREWFERLFSTSKDAWREIKSLEVRGDTVEVHVQLHFTLN

SEQ ID NO: 1541 - protein, 156 aa, synthetic construct
GQKHTVDLTHHFHFRGNRVTEVRVHIRFLSPHEKLKEIHAGANEEGEAAWEAFRAEARAALAAGGPPSLTEEQIRQFLRRFYEALDSGDADTAASLFHPGVTIHLWDGVTFTSREEFREWFERLFSTSKDAWREIKSLEVRGDTVEVHVQLHFTLN

SEQ ID NO: 1542 - protein, 156 aa, synthetic construct
GQKHTVDLTHHFHFRGNRVTEVRVHIRFLTPATALLELFAGATAEADAAWEAFRAEARAALAAGGPPSITEEQIRQFLRRFYEALDSGDADTAASLFHPGVTIHLWDGVTFTSREEFREWFERLFSTSKDAWREIKSLEVRGDTVEVHVQLHFTLN

SEQ ID NO: 1543 - protein, 156 aa, synthetic construct
GQKHTVDLTHHFHFRGNRVTEVRVHISFLTPAEKARELHAGTNEEGEARRAAFEAEARAALAAGGPPSLSEEQIRQFLRRFYEALDSGDADTAASLFHPGVTIHLWDGVTFTSREEFREWFERLFSTSKDAWREIKSLEVRGDTVEVHVQLHFTLN

SEQ ID NO: 1544 - protein, 156 aa, synthetic construct
GQKHTVDLTHHFHFRGNRVTEVRVHIRFLTPADKLKELHAGSNYDGEERWEAFRAEARAALAAGGPPSLSEEQIRQFLRRFYEALDSGDADTAASLFHPGVTIHLWDGVTFTSREEFREWFERLFSTSKDAWREIKSLEVRGDTVEVHVQLHFTLN

SEQ ID NO: 1545 - protein, 156 aa, synthetic construct
GQKHTVDLTHHFHFRGNRVTEVRVHIRFLTPADKAKELHAGANEEGDERWEAYRAEARAALAAGGPPSLSEEQIRQFLRRFYEALDSGDADTAASLFHPGVTIHLWDGVTFTSREEFREWFERLFSTSKDAWREIKSLEVRGDTVEVHVQLHFTLN

SEQ ID NO: 1546 - protein, 156 aa, synthetic construct
GQKHTVDLTHHFHFRGNRVTEVRVHIRFLSPATAALELHAGANAEGDEAWEAYRAEVRALLAAGGPPSLSEEQIRQFLRRFYEALDSGDADTAASLFHPGVTIHLWDGVTFTSREEFREWFERLFSTSKDAWREIKSLEVRGDTVEVHVQLHFTLN

SEQ ID NO: 1547 - protein, 156 aa, synthetic construct
GQKHTVDLTHHFHFRGNRVTEVRVHIRFLTPATKLKELFAGANEAGDAAWEAYRAEVRARLAAGGPPSLTEEQIRQFLRRFYEALDSGDADTAASLFHPGVTIHLWDGVTFTSREEFREWFERLFSTSKDAWREIKSLEVRGDTVEVHVQLHFTLN

SEQ ID NO: 1548 - protein, 156 aa, synthetic construct
GQKHTVDLTHHFHFRGNRVTEVRVHIRFLTPAEAARELHAGADEDADAAREAYRAEVRALLAAGGPPSLSEEQIRQFLRRFYEALDSGDADTAASLFHPGVTIHLWDGVTFTSREEFREWFERLFSTSKDAWREIKSLEVRGDTVEVHVQLHFTLN

SEQ ID NO: 1549 - protein, 157 aa, synthetic construct
GQKHTVDLTHHFHFRGNRVTEVRVHINPTVDGEEEERLLLLLLLLLLLLLLELLLLLLELLLELLGGPPMSEEQIRQFLRRFYEALDSGDADTAASLFHPGVTIHLWDGVTFTSREEFREWFERLFSTSKDAWREIKSLEVRGDTVEVHVQLHFTLN

SEQ ID NO: 1550 - protein, 157 aa, synthetic construct
GQKHTVDLTHHFHFRGNRVTEVRVHIVPVDDSLPVLDEFFGGGRFAGAAEEAEAESAALRAEVEGRPASLSEEQIRQFLRRFYEALDSGDADTAASLFHPGVTIHLWDGVTFTSREEFREWFERLFSTSKDAWREIKSLEVRGDTVEVHVQLHFTLN

SEQ ID NO: 1551 - protein, 157 aa, synthetic construct
GQKHTVDLTHHFHFRGNRVTEVRVHIVPVDDSLEVLSKYFGGGRFEGAAEEAAAESAALRAEVEGRPASLSEEQIRQFLRRFYEALDSGDADTAASLFHPGVTIHLWDGVTFTSREEFREWFERLFSTSKDAWREIKSLEVRGDTVEVHVQLHFTLN

SEQ ID NO: 1552 - protein, 157 aa, synthetic construct
GQKHTVDLTHHFHFRGNRVTEVRVHIVPVDDSLPVLAPAFGGGRLEGAAAEAAAESAALRAEVEGRPASLSEEQIRQFLRRFYEALDSGDADTAASLFHPGVTIHLWDGVTFTSREEFREWFERLFSTSKDAWREIKSLEVRGDTVEVHVQLHFTLN

SEQ ID NO: 1553 - protein, 157 aa, synthetic construct
GQKHTVDLTHHFHFRGNRVTEVRVHIVPVDDSLPVLEKAFGGGRLEGAAAEAEAESAALRAEVEGRPSSLSEEQIRQFLRRFYEALDSGDADTAASLFHPGVTIHLWDGVTFTSREEFREWFERLFSTSKDAWREIKSLEVRGDTVEVHVQLHFTLN

SEQ ID NO: 1554 - protein, 157 aa, synthetic construct
GQKHTVDLTHHFHFRGNRVTEVRVHIVPVDDSLPVLAPYLGSGSLEGAAERAEAESAALRAEVEGRPSSLSEEQIRQFLRRFYEALDSGDADTAASLFHPGVTIHLWDGVTFTSREEFREWFERLFSTSKDAWREIKSLEVRGDTVEVHVQLHFTLN

SEQ ID NO: 1555 - protein, 157 aa, synthetic construct
GQKHTVDLTHHFHFRGNRVTEVRVHIVPVDDSLAVLEPFFGSGALAGAQERRDAESAALRAEVEGKPASLSEEQIRQFLRRFYEALDSGDADTAASLFHPGVTIHLWDGVTFTSREEFREWFERLFSTSKDAWREIKSLEVRGDTVEVHVQLHFTLN

SEQ ID NO: 1556 - protein, 157 aa, synthetic construct
GQKHTVDLTHHFHFRGNRVTEVRVHIVPVDDSLAVLDKYFGGGRFAGAAEEAEAESAALRAEVEGRPSSLSEEQIRQFLRRFYEALDSGDADTAASLFHPGVTIHLWDGVTFTSREEFREWFERLFSTSKDAWREIKSLEVRGDTVEVHVQLHFTLN

SEQ ID NO: 1557 - protein, 157 aa, synthetic construct
GQKHTVDLTHHFHFRGNRVTEVRVHIVPVDDSLAVLEPLFGGGALAGAEERAAAESAALRERVAGRPSSLSEEQIRQFLRRFYEALDSGDADTAASLFHPGVTIHLWDGVTFTSREEFREWFERLFSTSKDAWREIKSLEVRGDTVEVHVQLHFTLN

SEQ ID NO: 1558 - protein, 157 aa, synthetic construct
GQKHTVDLTHHFHFRGNRVTEVRVHIVPVDDSLEVLSPYFGGGAFEGAAERAEAESAALRAEVEGRPASLSEEQIRQFLRRFYEALDSGDADTAASLFHPGVTIHLWDGVTFTSREEFREWFERLFSTSKDAWREIKSLEVRGDTVEVHVQLHFTLN

SEQ ID NO: 1559 - protein, 157 aa, synthetic construct
GQKHTVDLTHHFHFRGNRVTEVRVHIVPVDDSLPVLEKYFGGGRLKGARERAEEESAALRAEVEGRPASLSEEQIRQFLRRFYEALDSGDADTAASLFHPGVTIHLWDGVTFTSREEFREWFERLFSTSKDAWREIKSLEVRGDTVEVHVQLHFTLN

SEQ ID NO: 1560 - protein, 157 aa, synthetic construct
GQKHTVDLTHHFHFRGNRVTEVRVHIVPVDDSLPVLAPYFGGGSLEGSAEAAEAESAALRAAVEGTPSSLSEEQIRQFLRRFYEALDSGDADTAASLFHPGVTIHLWDGVTFTSREEFREWFERLFSTSKDAWREIKSLEVRGDTVEVHVQLHFTLN

SEQ ID NO: 1561 - protein, 157 aa, synthetic construct
GQKHTVDLTHHFHFRGNRVTEVRVHIVPVDDSLAVLSPYFGGGGLEGAAERAAAESAALRAAVAGRPSSLTEEQIRQFLRRFYEALDSGDADTAASLFHPGVTIHLWDGVTFTSREEFREWFERLFSTSKDAWREIKSLEVRGDTVEVHVQLHFTLN

SEQ ID NO: 1562 - protein, 157 aa, synthetic construct
GQKHTVDLTHHFHFRGNRVTEVRVHIVPVDDSLPVLEKFFGSGRYAGAAEEAAAESAALRAEVEGRPASLSEEQIRQFLRRFYEALDSGDADTAASLFHPGVTIHLWDGVTFTSREEFREWFERLFSTSKDAWREIKSLEVRGDTVEVHVQLHFTLN

SEQ ID NO: 1563 - protein, 157 aa, synthetic construct
GQKHTVDLTHHFHFRGNRVTEVRVHIVPVDDSLPVLEPYFGGAALAGAAEEAAAESAALRAEVEGRPSSLSEEQIRQFLRRFYEALDSGDADTAASLFHPGVTIHLWDGVTFTSREEFREWFERLFSTSKDAWREIKSLEVRGDTVEVHVQLHFTLN

SEQ ID NO: 1564 - protein, 157 aa, synthetic construct
GQKHTVDLTHHFHFRGNRVTEVRVHIVPVDDSLAVLEPFFGGGRLAGAAERAAAESAALRAAVEGRPASLSEEQIRQFLRRFYEALDSGDADTAASLFHPGVTIHLWDGVTFTSREEFREWFERLFSTSKDAWREIKSLEVRGDTVEVHVQLHFTLN

SEQ ID NO: 1565 - protein, 157 aa, synthetic construct
GQKHTVDLTHHFHFRGNRVTEVRVHIVPVDDSLPVLDPFFGGGRLAGAAERAEAESAALRAEVEGREPSLSEEQIRQFLRRFYEALDSGDADTAASLFHPGVTIHLWDGVTFTSREEFREWFERLFSTSKDAWREIKSLEVRGDTVEVHVQLHFTLN

SEQ ID NO: 1566 - protein, 157 aa, synthetic construct
GQKHTVDLTHHFHFRGNRVTEVRVHIVPVDDSLPVLDPFFGSGRYAGAREAAEAESAALRAEVEGRPSSLSEEQIRQFLRRFYEALDSGDADTAASLFHPGVTIHLWDGVTFTSREEFREWFERLFSTSKDAWREIKSLEVRGDTVEVHVQLHFTLN

SEQ ID NO: 1567 - protein, 157 aa, synthetic construct
GQKHTVDLTHHFHFRGNRVTEVRVHIVPVDDSLPVLAPYFGSGALDGAAAERDAESAALRAEVEGRAPTLSEEQIRQFLRRFYEALDSGDADTAASLFHPGVTIHLWDGVTFTSREEFREWFERLFSTSKDAWREIKSLEVRGDTVEVHVQLHFTLN

SEQ ID NO: 1568 - protein, 157 aa, synthetic construct
GQKHTVDLTHHFHFRGNRVTEVRVHIVPVDDSLAVLEPFFGGGRYAGAAEAAAAESAALRAEVEGRPASLSEEQIRQFLRRFYEALDSGDADTAASLFHPGVTIHLWDGVTFTSREEFREWFERLFSTSKDAWREIKSLEVRGDTVEVHVQLHFTLN

SEQ ID NO: 1569 - protein, 157 aa, synthetic construct
GQKHTVDLTHHFHFRGNRVTEVRVHIVPVDDSLPVLAEYFGSGRFEGAAEEAEAESAALRAEVEGRPASLSEEQIRQFLRRFYEALDSGDADTAASLFHPGVTIHLWDGVTFTSREEFREWFERLFSTSKDAWREIKSLEVRGDTVEVHVQLHFTLN

SEQ ID NO: 1570 - protein, 158 aa, synthetic construct
GQKHTVDLTHHFHFRGNRVTEVRVHINPTVDGEEELLLLLLLLLLLLLLLLLLLLLLLLLLLLLLAAAPPMSEEQIRQFLRRFYEALDSGDADTAASLFHPGVTIHLWDGVTFTSREEFREWFERLFSTSKDAWREIKSLEVRGDTVEVHVQLHFTLN

SEQ ID NO: 1571 - protein, 158 aa, synthetic construct
GQKHTVDLTHHFHFRGNRVTEVRVHITPLSGGALEEFLAGHVLADRGALAAEIAAESAARRAAEAARPPSISEEQIRQFLRRFYEALDSGDADTAASLFHPGVTIHLWDGVTFTSREEFREWFERLFSTSKDAWREIKSLEVRGDTVEVHVQLHFTLN

SEQ ID NO: 1572 - protein, 158 aa, synthetic construct
GQKHTVDLTHHFHFRGNRVTEVRVHIVPLSGGPLLEFLRGLTLADRGALRAAVEAESAELRARAAARPPEISEEQIRQFLRRFYEALDSGDADTAASLFHPGVTIHLWDGVTFTSREEFREWFERLFSTSKDAWREIKSLEVRGDTVEVHVQLHFTLN

SEQ ID NO: 1573 - protein, 158 aa, synthetic construct
GQKHTVDLTHHFHFRGNRVTEVRVHIVPLSGGALLEFLSKFTLKDTGAIRERVEAERRERRERAAERPPSISEEQIRQFLRRFYEALDSGDADTAASLFHPGVTIHLWDGVTFTSREEFREWFERLFSTSKDAWREIKSLEVRGDTVEVHVQLHFTLN

SEQ ID NO: 1574 - protein, 158 aa, synthetic construct
GQKHTVDLTHHFHFRGNRVTEVRVHIVPLSGGATLEFLSKLTLTDTGALAAEVAAESAALRAAAAARPPQISEEQIRQFLRRFYEALDSGDADTAASLFHPGVTIHLWDGVTFTSREEFREWFERLFSTSKDAWREIKSLEVRGDTVEVHVQLHFTLN

SEQ ID NO: 1575 - protein, 158 aa, synthetic construct
GQKHTVDLTHHFHFRGNRVTEVRVHIVPLSGGLTEEFLAKFTLKSRGEIRAAVEAERAERRAREAARPPSISEEQIRQFLRRFYEALDSGDADTAASLFHPGVTIHLWDGVTFTSREEFREWFERLFSTSKDAWREIKSLEVRGDTVEVHVQLHFTLN

SEQ ID NO: 1576 - protein, 158 aa, synthetic construct
GQKHTVDLTHHFHFRGNRVTEVRVHIVPLSGGLTLEFLEKFVVKDTGALRAEVEAESAALRAAAAARPPSISEEQIRQFLRRFYEALDSGDADTAASLFHPGVTIHLWDGVTFTSREEFREWFERLFSTSKDAWREIKSLEVRGDTVEVHVQLHFTLN

SEQ ID NO: 1577 - protein, 158 aa, synthetic construct
GQKHTVDLTHHFHFRGNRVTEVRVHITPLSGGPTLAFLRGLVLTDTGALRAEVEAESAALRAEAAARPPEISEEQIRQFLRRFYEALDSGDADTAASLFHPGVTIHLWDGVTFTSREEFREWFERLFSTSKDAWREIKSLEVRGDTVEVHVQLHFTLN

SEQ ID NO: 1578 - protein, 158 aa, synthetic construct
GQKHTVDLTHHFHFRGNRVTEVRVHIVPLSGGPLLAFLEKFTLKSTGEIRAEVEAERAARRAAAAARPPSISEEQIRQFLRRFYEALDSGDADTAASLFHPGVTIHLWDGVTFTSREEFREWFERLFSTSKDAWREIKSLEVRGDTVEVHVQLHFTLN

SEQ ID NO: 1579 - protein, 158 aa, synthetic construct
GQKHTVDLTHHFHFRGNRVTEVRVHIVPLSGGPLLEFLAKHVVKDTGAIRAAVEAESAERRAAAAARPPSISEEQIRQFLRRFYEALDSGDADTAASLFHPGVTIHLWDGVTFTSREEFREWFERLFSTSKDAWREIKSLEVRGDTVEVHVQLHFTLN

SEQ ID NO: 1580 - protein, 158 aa, synthetic construct
GQKHTVDLTHHFHFRGNRVTEVRVHIVPLSGGKTLEFLEKFTLKDRGAIRAEVEAERERLRAEAAARPPEISEEQIRQFLRRFYEALDSGDADTAASLFHPGVTIHLWDGVTFTSREEFREWFERLFSTSKDAWREIKSLEVRGDTVEVHVQLHFTLN

SEQ ID NO: 1581 - protein, 158 aa, synthetic construct
GQKHTVDLTHHFHFRGNRVTEVRVHIVPLSGGATLDFLAKFTLADRGALRAAVEAESAARRAAAAARAPSISEEQIRQFLRRFYEALDSGDADTAASLFHPGVTIHLWDGVTFTSREEFREWFERLFSTSKDAWREIKSLEVRGDTVEVHVQLHFTLN

SEQ ID NO: 1582 - protein, 158 aa, synthetic construct
GQKHTVDLTHHFHFRGNRVTEVRVHIVPRSGGPLLEFLEGLVLRDTGELRREVEAERERIRAEAAARPPSISEEQIRQFLRRFYEALDSGDADTAASLFHPGVTIHLWDGVTFTSREEFREWFERLFSTSKDAWREIKSLEVRGDTVEVHVQLHFTLN

SEQ ID NO: 1583 - protein, 158 aa, synthetic construct
GQKHTVDLTHHFHFRGNRVTEVRVHIVPLSGGPLLELLEKLVLKDRGALRAAVEAESAARRAAAAARPPEISEEQIRQFLRRFYEALDSGDADTAASLFHPGVTIHLWDGVTFTSREEFREWFERLFSTSKDAWREIKSLEVRGDTVEVHVQLHFTLN

SEQ ID NO: 1584 - protein, 158 aa, synthetic construct
GQKHTVDLTHHFHFRGNRVTEVRVHIVPLSGGLTLEFLAGFTLKDTGELRAAVEAEVAERRAAAAARPPSISEEQIRQFLRRFYEALDSGDADTAASLFHPGVTIHLWDGVTFTSREEFREWFERLFSTSKDAWREIKSLEVRGDTVEVHVQLHFTLN

SEQ ID NO: 1585 - protein, 158 aa, synthetic construct
GQKHTVDLTHHFHFRGNRVTEVRVHITPLSGGGLLALLEGFTLKDRGAIAAEVEAESAALRAEAAARPASISEEQIRQFLRRFYEALDSGDADTAASLFHPGVTIHLWDGVTFTSREEFREWFERLFSTSKDAWREIKSLEVRGDTVEVHVQLHFTLN

SEQ ID NO: 1586 - protein, 158 aa, synthetic construct
GQKHTVDLTHHFHFRGNRVTEVRVHIVPLSGGALLDFLAGLTLADRGAIAAEVEAERRARLAAEAAHPPSISEEQIRQFLRRFYEALDSGDADTAASLFHPGVTIHLWDGVTFTSREEFREWFERLFSTSKDAWREIKSLEVRGDTVEVHVQLHFTLN

SEQ ID NO: 1587 - protein, 158 aa, synthetic construct
GQKHTVDLTHHFHFRGNRVTEVRVHIVVKSGGLALEFHEKFVLKSTGEIAAAVEAERAARLAEAAARPPEISEEQIRQFLRRFYEALDSGDADTAASLFHPGVTIHLWDGVTFTSREEFREWFERLFSTSKDAWREIKSLEVRGDTVEVHVQLHFTLN

SEQ ID NO: 1588 - protein, 158 aa, synthetic construct
GQKHTVDLTHHFHFRGNRVTEVRVHIVPLSGGPLLALLEKFTLKDTGAIAAEVAAERAALLAEAAARAPEISEEQIRQFLRRFYEALDSGDADTAASLFHPGVTIHLWDGVTFTSREEFREWFERLFSTSKDAWREIKSLEVRGDTVEVHVQLHFTLN

SEQ ID NO: 1589 - protein, 158 aa, synthetic construct
GQKHTVDLTHHFHFRGNRVTEVRVHIVPLSGGPLLDLLSKFVVKDTGAIAAEVAAESAARRAEAAARPPSISEEQIRQFLRRFYEALDSGDADTAASLFHPGVTIHLWDGVTFTSREEFREWFERLFSTSKDAWREIKSLEVRGDTVEVHVQLHFTLN

SEQ ID NO: 1590 - protein, 158 aa, synthetic construct
GQKHTVDLTHHFHFRGNRVTEVRVHIVPLSEGLTLEFLKGLVLEDRGALRAEVEAERAERLARAAARPPEISEEQIRQFLRRFYEALDSGDADTAASLFHPGVTIHLWDGVTFTSREEFREWFERLFSTSKDAWREIKSLEVRGDTVEVHVQLHFTLN

SEQ ID NO: 1591 - protein, 159 aa, synthetic construct
GQKHTVDLTHHFHFRGNRVTEVRVHINPTVDGEEELRLLLLLLLLLLLLLLLLLLLLLLLLLLLLLAGAPPMSEEQIRQFLRRFYEALDSGDADTAASLFHPGVTIHLWDGVTFTSREEFREWFERLFSTSKDAWREIKSLEVRGDTVEVHVQLHFTLN

SEQ ID NO: 1592 - protein, 159 aa, synthetic construct
GQKHTVDLTHHFHFRGNRVTEVRVHIVPVDPDEVALAVLAELGAVPRPGRREELEALRAETRRREAGAAPSLSEEQIRQFLRRFYEALDSGDADTAASLFHPGVTIHLWDGVTFTSREEFREWFERLFSTSKDAWREIKSLEVRGDTVEVHVQLHFTLN

SEQ ID NO: 1593 - protein, 159 aa, synthetic construct
GQKHTVDLTHHFHFRGNRVTEVRVHIVPVDPETVAGEVLASLGYVPEPGRRERLEALRAATRAAMADAAPSLSEEQIRQFLRRFYEALDSGDADTAASLFHPGVTIHLWDGVTFTSREEFREWFERLFSTSKDAWREIKSLEVRGDTVEVHVQLHFTLN

SEQ ID NO: 1594 - protein, 159 aa, synthetic construct
GQKHTVDLTHHFHFRGNRVTEVRVHIAPVDPEDVALARLAELGAVPVPGRRAELEALRAATRAAEADRAPSLSEEQIRQFLRRFYEALDSGDADTAASLFHPGVTIHLWDGVTFTSREEFREWFERLFSTSKDAWREIKSLEVRGDTVEVHVQLHFTLN

SEQ ID NO: 1595 - protein, 159 aa, synthetic construct
GQKHTVDLTHHFHFRGNRVTEVRVHIVPVDPEEVAGAVLAKLGYVPRPGRRAELEALRERTRREAAGREPSLSEEQIRQFLRRFYEALDSGDADTAASLFHPGVTIHLWDGVTFTSREEFREWFERLFSTSKDAWREIKSLEVRGDTVEVHVQLHFTLN

SEQ ID NO: 1596 - protein, 159 aa, synthetic construct
GQKHTVDLTHHFHFRGNRVTEVRVHIAPVDPDDAAAAALAALGAVPAPGNRERLEALREATRERERDAEPSLSEEQIRQFLRRFYEALDSGDADTAASLFHPGVTIHLWDGVTFTSREEFREWFERLFSTSKDAWREIKSLEVRGDTVEVHVQLHFTLN

SEQ ID NO: 1597 - protein, 159 aa, synthetic construct
GQKHTVDLTHHFHFRGNRVTEVRVHIVPVDPDDVAGAVLASLGYVPRPGNRAALEALRAETRAATAGRAPSLSEEQIRQFLRRFYEALDSGDADTAASLFHPGVTIHLWDGVTFTSREEFREWFERLFSTSKDAWREIKSLEVRGDTVEVHVQLHFTLN

SEQ ID NO: 1598 - protein, 159 aa, synthetic construct
GQKHTVDLTHHFHFRGNRVTEVRVHIVPVDPETAALEVLASLGAVPRPGRREELERLRAETREEERDAEPSLSEEQIRQFLRRFYEALDSGDADTAASLFHPGVTIHLWDGVTFTSREEFREWFERLFSTSKDAWREIKSLEVRGDTVEVHVQLHFTLN

SEQ ID NO: 1599 - protein, 159 aa, synthetic construct
GQKHTVDLTHHFHFRGNRVTEVRVHIVPVDPETAALAVLASLGAVPRPGRREDLEALRARTREEAADREPSLSEEQIRQFLRRFYEALDSGDADTAASLFHPGVTIHLWDGVTFTSREEFREWFERLFSTSKDAWREIKSLEVRGDTVEVHVQLHFTLN

SEQ ID NO: 1600 - protein, 159 aa, synthetic construct
GQKHTVDLTHHFHFRGNRVTEVRVHIVPVDPETAALEVLAALGAVPRPGRREELERLRAETRERERDREPSLSEEQIRQFLRRFYEALDSGDADTAASLFHPGVTIHLWDGVTFTSREEFREWFERLFSTSKDAWREIKSLEVRGDTVEVHVQLHFTLN

SEQ ID NO: 1601 - protein, 159 aa, synthetic construct
GQKHTVDLTHHFHFRGNRVTEVRVHIVPVDEDTVAGEVLAALGYVPVPGRREELEALRERTRREMADAEPSLSEEQIRQFLRRFYEALDSGDADTAASLFHPGVTIHLWDGVTFTSREEFREWFERLFSTSKDAWREIKSLEVRGDTVEVHVQLHFTLN

SEQ ID NO: 1602 - protein, 159 aa, synthetic construct
GQKHTVDLTHHFHFRGNRVTEVRVHIVPVDPDDVALARLAELGAVPEPGRREALEALRAETRAAAADRAPSLSEEQIRQFLRRFYEALDSGDADTAASLFHPGVTIHLWDGVTFTSREEFREWFERLFSTSKDAWREIKSLEVRGDTVEVHVQLHFTLN

SEQ ID NO: 1603 - protein, 159 aa, synthetic construct
GQKHTVDLTHHFHFRGNRVTEVRVHIVPVDPESAALEALSALGAVPRPGRREELEALRAETRAAAAGREPSLSEEQIRQFLRRFYEALDSGDADTAASLFHPGVTIHLWDGVTFTSREEFREWFERLFSTSKDAWREIKSLEVRGDTVEVHVQLHFTLN

SEQ ID NO: 1604 - protein, 159 aa, synthetic construct
GQKHTVDLTHHFHFRGNRVTEVRVHIAPVDPETVALEVLAALGARPRPGRREELERLREETRRAAADREPSLSEEQIRQFLRRFYEALDSGDADTAASLFHPGVTIHLWDGVTFTSREEFREWFERLFSTSKDAWREIKSLEVRGDTVEVHVQLHFTLN

SEQ ID NO: 1605 - protein, 159 aa, synthetic construct
GQKHTVDLTHHFHFRGNRVTEVRVHIVPVDPETVALDVLAALGAVPRPGRRAELEALRAATREAAAGREPSLSEEQIRQFLRRFYEALDSGDADTAASLFHPGVTIHLWDGVTFTSREEFREWFERLFSTSKDAWREIKSLEVRGDTVEVHVQLHFTLN

SEQ ID NO: 1606 - protein, 159 aa, synthetic construct
GQKHTVDLTHHFHFRGNRVTEVRVHIVPVDPETAALEELAKLGAVPRPGRREELEALRAAARAAHADAAPSLSEEQIRQFLRRFYEALDSGDADTAASLFHPGVTIHLWDGVTFTSREEFREWFERLFSTSKDAWREIKSLEVRGDTVEVHVQLHFTLN

SEQ ID NO: 1607 - protein, 159 aa, synthetic construct
GQKHTVDLTHHFHFRGNRVTEVRVHIAPVDPDDVALAVLAALGAVPRPGRREELERLREETRREAADREPSLTEEQIRQFLRRFYEALDSGDADTAASLFHPGVTIHLWDGVTFTSREEFREWFERLFSTSKDAWREIKSLEVRGDTVEVHVQLHFTLN

SEQ ID NO: 1608 - protein, 159 aa, synthetic construct
GQKHTVDLTHHFHFRGNRVTEVRVHIVPVDPETAALAVLASLGAVPVPGRQEALDALRAATREAQADAAPSLSEEQIRQFLRRFYEALDSGDADTAASLFHPGVTIHLWDGVTFTSREEFREWFERLFSTSKDAWREIKSLEVRGDTVEVHVQLHFTLN

SEQ ID NO: 1609 - protein, 159 aa, synthetic construct
GQKHTVDLTHHFHFRGNRVTEVRVHIVPVDPDTVALEVLAALGAVPRPGREAELEALRAAARAAAADRAPSLSEEQIRQFLRRFYEALDSGDADTAASLFHPGVTIHLWDGVTFTSREEFREWFERLFSTSKDAWREIKSLEVRGDTVEVHVQLHFTLN

SEQ ID NO: 1610 - protein, 159 aa, synthetic construct
GQKHTVDLTHHFHFRGNRVTEVRVHIVPVDPETVALEVLAKLGAVPEPGRRERLEALRAETRAREADAAPSLSEEQIRQFLRRFYEALDSGDADTAASLFHPGVTIHLWDGVTFTSREEFREWFERLFSTSKDAWREIKSLEVRGDTVEVHVQLHFTLN

SEQ ID NO: 1611 - protein, 159 aa, synthetic construct
GQKHTVDLTHHFHFRGNRVTEVRVHIVPVDPEEVALAVLAALGARPVPGRREELEALREATRRAMADAAPSLSEEQIRQFLRRFYEALDSGDADTAASLFHPGVTIHLWDGVTFTSREEFREWFERLFSTSKDAWREIKSLEVRGDTVEVHVQLHFTLN

SEQ ID NO: 1612 - protein, 160 aa, synthetic construct
GQKHTVDLTHHFHFRGNRVTEVRVHINPTVDGPEELLRLLLLLLLLLLLLLLLLLLLLLLLLLLLLLAGRPPMSEEQIRQFLRRFYEALDSGDADTAASLFHPGVTIHLWDGVTFTSREEFREWFERLFSTSKDAWREIKSLEVRGDTVEVHVQLHFTLN

SEQ ID NO: 1613 - protein, 160 aa, synthetic construct
GQKHTVDLTHHFHFRGNRVTEVRVHIHLVDDGDAVNAAHAALSAAIPGAGSAEAIAAESAELRAAVAGRPPEISEEQIRQFLRRFYEALDSGDADTAASLFHPGVTIHLWDGVTFTSREEFREWFERLFSTSKDAWREIKSLEVRGDTVEVHVQLHFTLN

SEQ ID NO: 1614 - protein, 160 aa, synthetic construct
GQKHTVDLTHHFHFRGNRVTEVRVHIVLVDDGEAVNKAHAELSAPIKGDGGREEMEAWSARLRAEVAGRPPEISEEQIRQFLRRFYEALDSGDADTAASLFHPGVTIHLWDGVTFTSREEFREWFERLFSTSKDAWREIKSLEVRGDTVEVHVQLHFTLN

SEQ ID NO: 1615 - protein, 160 aa, synthetic construct
GQKHTVDLTHHFHFRGNRVTEVRVHIHLVDDGAAVDKAHAALSAPIPHAGGREAIAAETAALRAEVAGRPASISEEQIRQFLRRFYEALDSGDADTAASLFHPGVTIHLWDGVTFTSREEFREWFERLFSTSKDAWREIKSLEVRGDTVEVHVQLHFTLN

SEQ ID NO: 1616 - protein, 160 aa, synthetic construct
GQKHTVDLTHHFHFRGNRVTEVRVHIVLVDDGAAVDAAHAALSAPIAGDGGREEVEAWSAELRAAVAGRPPSISEEQIRQFLRRFYEALDSGDADTAASLFHPGVTIHLWDGVTFTSREEFREWFERLFSTSKDAWREIKSLEVRGDTVEVHVQLHFTLN

SEQ ID NO: 1617 - protein, 160 aa, synthetic construct
GQKHTVDLTHHFHFRGNRVTEVRVHIVVVDDGEAVNKAHAELAAPIPGAGGRAEVEAETAALRAAVAGAPPSISEEQIRQFLRRFYEALDSGDADTAASLFHPGVTIHLWDGVTFTSREEFREWFERLFSTSKDAWREIKSLEVRGDTVEVHVQLHFTLN

SEQ ID NO: 1618 - protein, 160 aa, synthetic construct
GQKHTVDLTHHFHFRGNRVTEVRVHIVVVDDSGAIDAAHAALSAAVPGAGGAAEMAAASAALRAEVAGAPPEISEEQIRQFLRRFYEALDSGDADTAASLFHPGVTIHLWDGVTFTSREEFREWFERLFSTSKDAWREIKSLEVRGDTVEVHVQLHFTLN

SEQ ID NO: 1619 - protein, 160 aa, synthetic construct
GQKHTVDLTHHFHFRGNRVTEVRVHIHVVDDGAAVDKAHAELSAPIAGAGGREAIEAESAALRAAVAGRPPSISEEQIRQFLRRFYEALDSGDADTAASLFHPGVTIHLWDGVTFTSREEFREWFERLFSTSKDAWREIKSLEVRGDTVEVHVQLHFTLN

SEQ ID NO: 1620 - protein, 160 aa, synthetic construct
GQKHTVDLTHHFHFRGNRVTEVRVHIHLVDEGGAVDAAHGALSAPIPGNGSREAIEAESAALREAVAGRPPSISEEQIRQFLRRFYEALDSGDADTAASLFHPGVTIHLWDGVTFTSREEFREWFERLFSTSKDAWREIKSLEVRGDTVEVHVQLHFTLN

SEQ ID NO: 1621 - protein, 160 aa, synthetic construct
GQKHTVDLTHHFHFRGNRVTEVRVHIVLVDDGGAVQRAHAALAAPIPGAGGREEMEAESAALRAAVAGAPPSISEEQIRQFLRRFYEALDSGDADTAASLFHPGVTIHLWDGVTFTSREEFREWFERLFSTSKDAWREIKSLEVRGDTVEVHVQLHFTLN

SEQ ID NO: 1622 - protein, 160 aa, synthetic construct
GQKHTVDLTHHFHFRGNRVTEVRVHIVLRDDGAAVNAAHAALAAPVRGDGGREEMEAESAALREAVAGRPPSISEEQIRQFLRRFYEALDSGDADTAASLFHPGVTIHLWDGVTFTSREEFREWFERLFSTSKDAWREIKSLEVRGDTVEVHVQLHFTLN

SEQ ID NO: 1623 - protein, 160 aa, synthetic construct
GQKHTVDLTHHFHFRGNRVTEVRVHIHRVDDGAAVDKAHAELAAAVPGDGAAAAIAAESAALRAAVAGRPPSISEEQIRQFLRRFYEALDSGDADTAASLFHPGVTIHLWDGVTFTSREEFREWFERLFSTSKDAWREIKSLEVRGDTVEVHVQLHFTLN

SEQ ID NO: 1624 - protein, 160 aa, synthetic construct
GQKHTVDLTHHFHFRGNRVTEVRVHIHLLDDGAAVDAAHAALAAPIPGAGGREAIAAASAALRAEVAGRPPEISEEQIRQFLRRFYEALDSGDADTAASLFHPGVTIHLWDGVTFTSREEFREWFERLFSTSKDAWREIKSLEVRGDTVEVHVQLHFTLN

SEQ ID NO: 1625 - protein, 160 aa, synthetic construct
GQKHTVDLTHHFHFRGNRVTEVRVHIVLLDDGGAVNKAHAALSAPIPGAGGREAMAAESAALRAEVAGRPPSISEEQIRQFLRRFYEALDSGDADTAASLFHPGVTIHLWDGVTFTSREEFREWFERLFSTSKDAWREIKSLEVRGDTVEVHVQLHFTLN

SEQ ID NO: 1626 - protein, 160 aa, synthetic construct
GQKHTVDLTHHFHFRGNRVTEVRVHIRLVDDGAAVNAAHAALAAPIPADGAAAAIEAESAALRAEVAGRPAEISEEQIRQFLRRFYEALDSGDADTAASLFHPGVTIHLWDGVTFTSREEFREWFERLFSTSKDAWREIKSLEVRGDTVEVHVQLHFTLN

SEQ ID NO: 1627 - protein, 160 aa, synthetic construct
GQKHTVDLTHHFHFRGNRVTEVRVHIVVVDDGAAVNAAHAALAAPIPGDGGREAMEAESAALRAAVAGRPPSISEEQIRQFLRRFYEALDSGDADTAASLFHPGVTIHLWDGVTFTSREEFREWFERLFSTSKDAWREIKSLEVRGDTVEVHVQLHFTLN

SEQ ID NO: 1628 - protein, 160 aa, synthetic construct
GQKHTVDLTHHFHFRGNRVTEVRVHIVVVDDGGAVDAAHAALSAPIAGGGGREEMAAASAALRAEVAGAPAEISEEQIRQFLRRFYEALDSGDADTAASLFHPGVTIHLWDGVTFTSREEFREWFERLFSTSKDAWREIKSLEVRGDTVEVHVQLHFTLN

SEQ ID NO: 1629 - protein, 160 aa, synthetic construct
GQKHTVDLTHHFHFRGNRVTEVRVHIVPVDDLEAVQKAHGELLAPIPGAGGREAMAAETAALRAAVAGRPPEISEEQIRQFLRRFYEALDSGDADTAASLFHPGVTIHLWDGVTFTSREEFREWFERLFSTSKDAWREIKSLEVRGDTVEVHVQLHFTLN

SEQ ID NO: 1630 - protein, 160 aa, synthetic construct
GQKHTVDLTHHFHFRGNRVTEVRVHIHLLDDGAAVDKAHAALAAPIPHAGTREAIAAESAALRAAVAGRPPSISEEQIRQFLRRFYEALDSGDADTAASLFHPGVTIHLWDGVTFTSREEFREWFERLFSTSKDAWREIKSLEVRGDTVEVHVQLHFTLN

SEQ ID NO: 1631 - protein, 160 aa, synthetic construct
GQKHTVDLTHHFHFRGNRVTEVRVHIVKVDDGAAVDKAHASLSAPIAGAGGRAAMEAETAELRAAVAGRPPEISEEQIRQFLRRFYEALDSGDADTAASLFHPGVTIHLWDGVTFTSREEFREWFERLFSTSKDAWREIKSLEVRGDTVEVHVQLHFTLN

SEQ ID NO: 1632 - protein, 160 aa, synthetic construct
GQKHTVDLTHHFHFRGNRVTEVRVHIVLVDDGGAVQAAHAALAAPVAGGGGAAAVAAESAALRAAVAGRAPEISEEQIRQFLRRFYEALDSGDADTAASLFHPGVTIHLWDGVTFTSREEFREWFERLFSTSKDAWREIKSLEVRGDTVEVHVQLHFTLN

SEQ ID NO: 1633 - protein, 161 aa, synthetic construct
GQKHTVDLTHHFHFRGNRVTEVRVHINPTVDGEEELLRLLLLLLLLLLLLLLLLLLLLLLLLLLLLLLLGGPPMSEEQIRQFLRRFYEALDSGDADTAASLFHPGVTIHLWDGVTFTSREEFREWFERLFSTSKDAWREIKSLEVRGDTVEVHVQLHFTLN

SEQ ID NO: 1634 - protein, 161 aa, synthetic construct
GQKHTVDLTHHFHFRGNRVTEVRVHIVSVDGSEEFFEVLSKLFNPNFSTENQQARLQELLDEVARVRGSGPPSLSEEQIRQFLRRFYEALDSGDADTAASLFHPGVTIHLWDGVTFTSREEFREWFERLFSTSKDAWREIKSLEVRGDTVEVHVQLHFTLN

SEQ ID NO: 1635 - protein, 161 aa, synthetic construct
GQKHTVDLTHHFHFRGNRVTEVRVHIVTVDGSQDFLDRLASLFAPDLSAADQQARLAALRAAVAARRGSGPPSLSEEQIRQFLRRFYEALDSGDADTAASLFHPGVTIHLWDGVTFTSREEFREWFERLFSTSKDAWREIKSLEVRGDTVEVHVQLHFTLN

SEQ ID NO: 1636 - protein, 161 aa, synthetic construct
GQKHTVDLTHHFHFRGNRVTEVRVHITVVDGSDDFLAVLSSLFNPDLSTENQQERLAALRALVAAEAGSGPPSLTEEQIRQFLRRFYEALDSGDADTAASLFHPGVTIHLWDGVTFTSREEFREWFERLFSTSKDAWREIKSLEVRGDTVEVHVQLHFTLN

SEQ ID NO: 1637 - protein, 161 aa, synthetic construct
GQKHTVDLTHHFHFRGNRVTEVRVHITVVDGSEEFLEVLAKLFNPDLSLEDQEARRAALLEEVEAVRGSGPPSLSEEQIRQFLRRFYEALDSGDADTAASLFHPGVTIHLWDGVTFTSREEFREWFERLFSTSKDAWREIKSLEVRGDTVEVHVQLHFTLN

SEQ ID NO: 1638 - protein, 161 aa, synthetic construct
GQKHTVDLTHHFHFRGNRVTEVRVHIVVVDGSEEFLQVLAELFNPDFSLENQEERRQALLDEVAAVRGSGPPSLSEEQIRQFLRRFYEALDSGDADTAASLFHPGVTIHLWDGVTFTSREEFREWFERLFSTSKDAWREIKSLEVRGDTVEVHVQLHFTLN

SEQ ID NO: 1639 - protein, 161 aa, synthetic construct
GQKHTVDLTHHFHFRGNRVTEVRVHIVLVDGSQDFLDVLASLFNPGLSAADQEARRAALLALVEAERGSGPPSLSEEQIRQFLRRFYEALDSGDADTAASLFHPGVTIHLWDGVTFTSREEFREWFERLFSTSKDAWREIKSLEVRGDTVEVHVQLHFTLN

SEQ ID NO: 1640 - protein, 161 aa, synthetic construct
GQKHTVDLTHHFHFRGNRVTEVRVHIVLVDGSQEYLDVLAKLFNPNLSVENQQARLAALRAEVAAVAGSGPPSLTEEQIRQFLRRFYEALDSGDADTAASLFHPGVTIHLWDGVTFTSREEFREWFERLFSTSKDAWREIKSLEVRGDTVEVHVQLHFTLN

SEQ ID NO: 1641 - protein, 161 aa, synthetic construct
GQKHTVDLTHHFHFRGNRVTEVRVHIRLVDGSEDFLAVLASLFNPNLTSEGQEERVAALRELVRREAGSGPPSLSEEQIRQFLRRFYEALDSGDADTAASLFHPGVTIHLWDGVTFTSREEFREWFERLFSTSKDAWREIKSLEVRGDTVEVHVQLHFTLN

SEQ ID NO: 1642 - protein, 161 aa, synthetic construct
GQKHTVDLTHHFHFRGNRVTEVRVHIVLVDGSEDFLKVLAELFNPDFSRENQEERLAALRALVEAERGSGPPSLSEEQIRQFLRRFYEALDSGDADTAASLFHPGVTIHLWDGVTFTSREEFREWFERLFSTSKDAWREIKSLEVRGDTVEVHVQLHFTLN

SEQ ID NO: 1643 - protein, 161 aa, synthetic construct
GQKHTVDLTHHFHFRGNRVTEVRVHIVLTDGSQDFLDLLSRLFNPDLSREGQEERLAALRAEVAARAGSGPPSLSEEQIRQFLRRFYEALDSGDADTAASLFHPGVTIHLWDGVTFTSREEFREWFERLFSTSKDAWREIKSLEVRGDTVEVHVQLHFTLN

SEQ ID NO: 1644 - protein, 161 aa, synthetic construct
GQKHTVDLTHHFHFRGNRVTEVRVHIVLSDGSQEFLDVLAKLFNPDLSLEGQEERRAALLAEVEAVRGSGPPSLSEEQIRQFLRRFYEALDSGDADTAASLFHPGVTIHLWDGVTFTSREEFREWFERLFSTSKDAWREIKSLEVRGDTVEVHVQLHFTLN

SEQ ID NO: 1645 - protein, 161 aa, synthetic construct
GQKHTVDLTHHFHFRGNRVTEVRVHITVVDGSQDYLDLLAKLFNPDLTTADQQARLAALRAEVAATAGSGPPSLSEEQIRQFLRRFYEALDSGDADTAASLFHPGVTIHLWDGVTFTSREEFREWFERLFSTSKDAWREIKSLEVRGDTVEVHVQLHFTLN

SEQ ID NO: 1646 - protein, 161 aa, synthetic construct
GQKHTVDLTHHFHFRGNRVTEVRVHIRLVDGSEEFLALLAELFNPDLTAEDQEARVAALRALVAARRGSGPPSLSEEQIRQFLRRFYEALDSGDADTAASLFHPGVTIHLWDGVTFTSREEFREWFERLFSTSKDAWREIKSLEVRGDTVEVHVQLHFTLN

SEQ ID NO: 1647 - protein, 161 aa, synthetic construct
GQKHTVDLTHHFHFRGNRVTEVRVHITLVDGSTEFLEVLAKLFNPDLSAEDQEARRAALLAAVEATRGSGPPSLSEEQIRQFLRRFYEALDSGDADTAASLFHPGVTIHLWDGVTFTSREEFREWFERLFSTSKDAWREIKSLEVRGDTVEVHVQLHFTLN

SEQ ID NO: 1648 - protein, 161 aa, synthetic construct
GQKHTVDLTHHFHFRGNRVTEVRVHIVLVDGSTEYLDVLAELFAPDLTAEDQEARLAALRAAVAAVAGSGPPSLSEEQIRQFLRRFYEALDSGDADTAASLFHPGVTIHLWDGVTFTSREEFREWFERLFSTSKDAWREIKSLEVRGDTVEVHVQLHFTLN

SEQ ID NO: 1649 - protein, 161 aa, synthetic construct
GQKHTVDLTHHFHFRGNRVTEVRVHITVVDGSEEFLRVLSELFNPDLSLENQEARLAELRALVEARRGSGPPSLSEEQIRQFLRRFYEALDSGDADTAASLFHPGVTIHLWDGVTFTSREEFREWFERLFSTSKDAWREIKSLEVRGDTVEVHVQLHFTLN

SEQ ID NO: 1650 - protein, 161 aa, synthetic construct
GQKHTVDLTHHFHFRGNRVTEVRVHIVLVDGSEEFLQVLAELFNPDLSSEGQEERLAALRALVEAERGSGPPSLSEEQIRQFLRRFYEALDSGDADTAASLFHPGVTIHLWDGVTFTSREEFREWFERLFSTSKDAWREIKSLEVRGDTVEVHVQLHFTLN

SEQ ID NO: 1651 - protein, 161 aa, synthetic construct
GQKHTVDLTHHFHFRGNRVTEVRVHIVLSDGSEEFLEVLGKLFAPDVTREGQEERLAALRALVAERAGSGPPSLSEEQIRQFLRRFYEALDSGDADTAASLFHPGVTIHLWDGVTFTSREEFREWFERLFSTSKDAWREIKSLEVRGDTVEVHVQLHFTLN

SEQ ID NO: 1652 - protein, 161 aa, synthetic construct
GQKHTVDLTHHFHFRGNRVTEVRVHIVVVDGSEDFLKVLAELFNPDFSLENQEERRAALLEAVAATAGSGPPSLSEEQIRQFLRRFYEALDSGDADTAASLFHPGVTIHLWDGVTFTSREEFREWFERLFSTSKDAWREIKSLEVRGDTVEVHVQLHFTLN

SEQ ID NO: 1653 - protein, 161 aa, synthetic construct
GQKHTVDLTHHFHFRGNRVTEVRVHIVLVDGDQEFLDLLAELFNPDFSLEGQEERRAALLAEVAARAGSGPPSLSEEQIRQFLRRFYEALDSGDADTAASLFHPGVTIHLWDGVTFTSREEFREWFERLFSTSKDAWREIKSLEVRGDTVEVHVQLHFTLN

SEQ ID NO: 1654 - protein, 162 aa, synthetic construct
GQKHTVDLTHHFHFRGNRVTEVRVHINPTVPDEDEEELREAVREALERAGVPEELRELALEALEAGRREAFGPAMSEEQIRQFLRRFYEALDSGDADTAASLFHPGVTIHLWDGVTFTSREEFREWFERLFSTSKDAWREIKSLEVRGDTVEVHVQLHFTLN

SEQ ID NO: 1655 - protein, 162 aa, synthetic construct
GQKHTVDLTHHFHFRGNRVTEVRVHIVPVPDPSEETQLAAARESLEAVGVPEEMRRRLLENLEAGRTEHFEESSIPEEQIRQFLRRFYEALDSGDADTAASLFHPGVTIHLWDGVTFTSREEFREWFERLFSTSKDAWREIKSLEVRGDTVEVHVQLHFTLN

SEQ ID NO: 1656 - protein, 162 aa, synthetic construct
GQKHTVDLTHHFHFRGNRVTEVRVHIVPLPDPSEATRLAAARESLEAAGVPEEARRALLENLERGEREHFGPSSIPEEQIRQFLRRFYEALDSGDADTAASLFHPGVTIHLWDGVTFTSREEFREWFERLFSTSKDAWREIKSLEVRGDTVEVHVQLHFTLN

SEQ ID NO: 1657 - protein, 162 aa, synthetic construct
GQKHTVDLTHHFHFRGNRVTEVRVHIVPLPNPDEETRLAAARESLEAIGAPPEVRARLLENLERGEREHFGPSSIPEEQIRQFLRRFYEALDSGDADTAASLFHPGVTIHLWDGVTFTSREEFREWFERLFSTSKDAWREIKSLEVRGDTVEVHVQLHFTLN

SEQ ID NO: 1658 - protein, 162 aa, synthetic construct
GQKHTVDLTHHFHFRGNRVTEVRVHIVPVPNPDEETRLAAFRESLEAVGVPEEMRRALLENLERGEREHFGPSSIPEEQIRQFLRRFYEALDSGDADTAASLFHPGVTIHLWDGVTFTSREEFREWFERLFSTSKDAWREIKSLEVRGDTVEVHVQLHFTLN

SEQ ID NO: 1659 - protein, 162 aa, synthetic construct
GQKHTVDLTHHFHFRGNRVTEVRVHIVPLPDPSEETRLEATREALEANGVAPEARERLLRNLEEGRTEHFEPSSIPEEQIRQFLRRFYEALDSGDADTAASLFHPGVTIHLWDGVTFTSREEFREWFERLFSTSKDAWREIKSLEVRGDTVEVHVQLHFTLN

SEQ ID NO: 1660 - protein, 162 aa, synthetic construct
GQKHTVDLTHHFHFRGNRVTEVRVHIVPVPSPDEATRRAAAARSLEAVGVPPELREALLANLAAGRTEHFGPSTIPEEQIRQFLRRFYEALDSGDADTAASLFHPGVTIHLWDGVTFTSREEFREWFERLFSTSKDAWREIKSLEVRGDTVEVHVQLHFTLN

SEQ ID NO: 1661 - protein, 162 aa, synthetic construct
GQKHTVDLTHHFHFRGNRVTEVRVHIVPLPDDSEETRLAAVRESLEAVGAPAEARAAVLANLEAGRTERFGPSTIPEEQIRQFLRRFYEALDSGDADTAASLFHPGVTIHLWDGVTFTSREEFREWFERLFSTSKDAWREIKSLEVRGDTVEVHVQLHFTLN

SEQ ID NO: 1662 - protein, 162 aa, synthetic construct
GQKHTVDLTHHFHFRGNRVTEVRVHIVPVPDPSEPARLAATREALDAVGVAPEAREALLRNLEAGRREHFGPSTIPEEQIRQFLRRFYEALDSGDADTAASLFHPGVTIHLWDGVTFTSREEFREWFERLFSTSKDAWREIKSLEVRGDTVEVHVQLHFTLN

SEQ ID NO: 1663 - protein, 162 aa, synthetic construct
GQKHTVDLTHHFHFRGNRVTEVRVHIVPVPNPDRETQLAAFRESLERNGVPAEMRAALLENIERGERERFGPSAIPEEQIRQFLRRFYEALDSGDADTAASLFHPGVTIHLWDGVTFTSREEFREWFERLFSTSKDAWREIKSLEVRGDTVEVHVQLHFTLN

SEQ ID NO: 1664 - protein, 162 aa, synthetic construct
GQKHTVDLTHHFHFRGNRVTEVRVHIVPLPDDSEETRLAAVRESLERVGAPPEARERVLRNLEAGRTEYFEPSSIPEEQIRQFLRRFYEALDSGDADTAASLFHPGVTIHLWDGVTFTSREEFREWFERLFSTSKDAWREIKSLEVRGDTVEVHVQLHFTLN

SEQ ID NO: 1665 - protein, 162 aa, synthetic construct
GQKHTVDLTHHFHFRGNRVTEVRVHIVPLPSDDEATRLAGIERALEANGVPAEMREAVLANLRAGRRETFGPSSIPEEQIRQFLRRFYEALDSGDADTAASLFHPGVTIHLWDGVTFTSREEFREWFERLFSTSKDAWREIKSLEVRGDTVEVHVQLHFTLN

SEQ ID NO: 1666 - protein, 162 aa, synthetic construct
GQKHTVDLTHHFHFRGNRVTEVRVHIVPVPNPDAATRLAAARASLEAVGAPADMRAALLANLEAGRTEHFEPSAIPEEQIRQFLRRFYEALDSGDADTAASLFHPGVTIHLWDGVTFTSREEFREWFERLFSTSKDAWREIKSLEVRGDTVEVHVQLHFTLN

SEQ ID NO: 1667 - protein, 162 aa, synthetic construct
GQKHTVDLTHHFHFRGNRVTEVRVHIVPLPDDSEETRLEARRRALEAIGVPEDMRRRLLENIEAGKTEHFEESTIPEEQIRQFLRRFYEALDSGDADTAASLFHPGVTIHLWDGVTFTSREEFREWFERLFSTSKDAWREIKSLEVRGDTVEVHVQLHFTLN

SEQ ID NO: 1668 - protein, 162 aa, synthetic construct
GQKHTVDLTHHFHFRGNRVTEVRVHIVPLPDDSEETRLAAFRRSLEANGVPEAAREALLRNLEAGETEHFEPSSIPEEQIRQFLRRFYEALDSGDADTAASLFHPGVTIHLWDGVTFTSREEFREWFERLFSTSKDAWREIKSLEVRGDTVEVHVQLHFTLN

SEQ ID NO: 1669 - protein, 162 aa, synthetic construct
GQKHTVDLTHHFHFRGNRVTEVRVHIVPVPDDSEAARLAAFEQSLAANGVPEEMRARLLENLRAGEREHFGPSTIPEEQIRQFLRRFYEALDSGDADTAASLFHPGVTIHLWDGVTFTSREEFREWFERLFSTSKDAWREIKSLEVRGDTVEVHVQLHFTLN

SEQ ID NO: 1670 - protein, 162 aa, synthetic construct
GQKHTVDLTHHFHFRGNRVTEVRVHIVPVPDPSEETRLAAFEESLERNGVPPEMREALLANLRAGEREHFGPSSIPEEQIRQFLRRFYEALDSGDADTAASLFHPGVTIHLWDGVTFTSREEFREWFERLFSTSKDAWREIKSLEVRGDTVEVHVQLHFTLN

SEQ ID NO: 1671 - protein, 162 aa, synthetic construct
GQKHTVDLTHHFHFRGNRVTEVRVHIVPLPDPDEATRLAATRAALEAVGVPAEARAALLANLEAGRREHFEESTIPEEQIRQFLRRFYEALDSGDADTAASLFHPGVTIHLWDGVTFTSREEFREWFERLFSTSKDAWREIKSLEVRGDTVEVHVQLHFTLN

SEQ ID NO: 1672 - protein, 162 aa, synthetic construct
GQKHTVDLTHHFHFRGNRVTEVRVHIVPVPDPDEATRLAAFRESLEANGVPPEMRAALLANLEAGRREHFGPSTIPEEQIRQFLRRFYEALDSGDADTAASLFHPGVTIHLWDGVTFTSREEFREWFERLFSTSKDAWREIKSLEVRGDTVEVHVQLHFTLN

SEQ ID NO: 1673 - protein, 162 aa, synthetic construct
GQKHTVDLTHHFHFRGNRVTEVRVHIVPLPDDDEETRLRAFEESLERNGVPEEARRRLLENLRAGRTEHFEESSIPEEQIRQFLRRFYEALDSGDADTAASLFHPGVTIHLWDGVTFTSREEFREWFERLFSTSKDAWREIKSLEVRGDTVEVHVQLHFTLN

SEQ ID NO: 1674 - protein, 162 aa, synthetic construct
GQKHTVDLTHHFHFRGNRVTEVRVHIVPVPDPSEETRLAAIRESLEANGVPEEMRRRILENLEAGRTEYFEPSTIPEEQIRQFLRRFYEALDSGDADTAASLFHPGVTIHLWDGVTFTSREEFREWFERLFSTSKDAWREIKSLEVRGDTVEVHVQLHFTLN

SEQ ID NO: 1675 - protein, 163 aa, synthetic construct
GQKHTVDLTHHFHFRGNRVTEVRVHINPTVEGEEELEEALREGLERAAELGGEELLLLLLLLLLLGGEVVVVEEGMSEEQIRQFLRRFYEALDSGDADTAASLFHPGVTIHLWDGVTFTSREEFREWFERLFSTSKDAWREIKSLEVRGDTVEVHVQLHFTLN

SEQ ID NO: 1676 - protein, 163 aa, synthetic construct
GQKHTVDLTHHFHFRGNRVTEVRVHIVEVRSPEEAPAAGVESLRRGAELSDPALLEAGLAALAAPGFRTTVTPGSISEEQIRQFLRRFYEALDSGDADTAASLFHPGVTIHLWDGVTFTSREEFREWFERLFSTSKDAWREIKSLEVRGDTVEVHVQLHFTLN

SEQ ID NO: 1677 - protein, 163 aa, synthetic construct
GQKHTVDLTHHFHFRGNRVTEVRVHIVEVESEEEAPAAGLESVERMAELSTPELLEAMRANLAAPGFRTVVTPGSISEEQIRQFLRRFYEALDSGDADTAASLFHPGVTIHLWDGVTFTSREEFREWFERLFSTSKDAWREIKSLEVRGDTVEVHVQLHFTLN

SEQ ID NO: 1678 - protein, 163 aa, synthetic construct
GQKHTVDLTHHFHFRGNRVTEVRVHIVEVSSPEEAPQAGLESVERMAELSTPALLEAMRENLARPGFVTTVEPGSISEEQIRQFLRRFYEALDSGDADTAASLFHPGVTIHLWDGVTFTSREEFREWFERLFSTSKDAWREIKSLEVRGDTVEVHVQLHFTLN

SEQ ID NO: 1679 - protein, 163 aa, synthetic construct
GQKHTVDLTHHFHFRGNRVTEVRVHIVEVESEEQAQEAAIQSVELMGELSDEALLEAMLENLKKPGFVETVEPGSISEEQIRQFLRRFYEALDSGDADTAASLFHPGVTIHLWDGVTFTSREEFREWFERLFSTSKDAWREIKSLEVRGDTVEVHVQLHFTLN

SEQ ID NO: 1680 - protein, 163 aa, synthetic construct
GQKHTVDLTHHFHFRGNRVTEVRVHIVEVESEEEAPEAGRRSVRRMAELSTPELEAAMLEALAAPGFRTTVTPGSISEEQIRQFLRRFYEALDSGDADTAASLFHPGVTIHLWDGVTFTSREEFREWFERLFSTSKDAWREIKSLEVRGDTVEVHVQLHFTLN

SEQ ID NO: 1681 - protein, 163 aa, synthetic construct
GQKHTVDLTHHFHFRGNRVTEVRVHIVEVKSEEEAPEAGLRSLRLGAELSTPELLEAMSANLQAPGFRTVVTPGSISEEQIRQFLRRFYEALDSGDADTAASLFHPGVTIHLWDGVTFTSREEFREWFERLFSTSKDAWREIKSLEVRGDTVEVHVQLHFTLN

SEQ ID NO: 1682 - protein, 163 aa, synthetic construct
GQKHTVDLTHHFHFRGNRVTEVRVHIVEVRSPEEAPQAGLESVRRGEELSDPALGEAMRERLAQPGFRTVVTPGSISEEQIRQFLRRFYEALDSGDADTAASLFHPGVTIHLWDGVTFTSREEFREWFERLFSTSKDAWREIKSLEVRGDTVEVHVQLHFTLN

SEQ ID NO: 1683 - protein, 163 aa, synthetic construct
GQKHTVDLTHHFHFRGNRVTEVRVHIVEVESEEQAPEAALRSVEIGEELSTPELGEAMRRNLLEPGFVTTVTPGSISEEQIRQFLRRFYEALDSGDADTAASLFHPGVTIHLWDGVTFTSREEFREWFERLFSTSKDAWREIKSLEVRGDTVEVHVQLHFTLN

SEQ ID NO: 1684 - protein, 163 aa, synthetic construct
GQKHTVDLTHHFHFRGNRVTEVRVHIVEVKSPEEAAQAGVESARRGGELSTPELLEAMLANLAQPGFVTTVTPGSISEEQIRQFLRRFYEALDSGDADTAASLFHPGVTIHLWDGVTFTSREEFREWFERLFSTSKDAWREIKSLEVRGDTVEVHVQLHFTLN

SEQ ID NO: 1685 - protein, 163 aa, synthetic construct
GQKHTVDLTHHFHFRGNRVTEVRVHIVEVESEEEAPAAGLRSVEIGAELSTPELLEAMTANLAAPGFVETVTPGSISEEQIRQFLRRFYEALDSGDADTAASLFHPGVTIHLWDGVTFTSREEFREWFERLFSTSKDAWREIKSLEVRGDTVEVHVQLHFTLN

SEQ ID NO: 1686 - protein, 163 aa, synthetic construct
GQKHTVDLTHHFHFRGNRVTEVRVHIVEVASPEQAPQAALESARRGGELSDPELLAAMEANLQAPGFRTTVTPGSISEEQIRQFLRRFYEALDSGDADTAASLFHPGVTIHLWDGVTFTSREEFREWFERLFSTSKDAWREIKSLEVRGDTVEVHVQLHFTLN

SEQ ID NO: 1687 - protein, 163 aa, synthetic construct
GQKHTVDLTHHFHFRGNRVTEVRVHIVEVSSPEEAPQAALESVERMGELSTPELLAAMTERLRQPGFREVVEPGSISEEQIRQFLRRFYEALDSGDADTAASLFHPGVTIHLWDGVTFTSREEFREWFERLFSTSKDAWREIKSLEVRGDTVEVHVQLHFTLN

SEQ ID NO: 1688 - protein, 163 aa, synthetic construct
GQKHTVDLTHHFHFRGNRVTEVRVHIVEVESEEQAPASALESARRGGELSTPELLAAMTARLAAPGFREVVTPGSISEEQIRQFLRRFYEALDSGDADTAASLFHPGVTIHLWDGVTFTSREEFREWFERLFSTSKDAWREIKSLEVRGDTVEVHVQLHFTLN

SEQ ID NO: 1689 - protein, 163 aa, synthetic construct
GQKHTVDLTHHFHFRGNRVTEVRVHIVEVKSEEEAPQAGVESARRMGELSTPELLEAMLANLAAPGFRTVVTPGSISEEQIRQFLRRFYEALDSGDADTAASLFHPGVTIHLWDGVTFTSREEFREWFERLFSTSKDAWREIKSLEVRGDTVEVHVQLHFTLN

SEQ ID NO: 1690 - protein, 163 aa, synthetic construct
GQKHTVDLTHHFHFRGNRVTEVRVHIVEVESEEAAPAAARASAERGGELSTPELLEAMLRLLAEPGFRTVVTPGSISEEQIRQFLRRFYEALDSGDADTAASLFHPGVTIHLWDGVTFTSREEFREWFERLFSTSKDAWREIKSLEVRGDTVEVHVQLHFTLN

SEQ ID NO: 1691 - protein, 163 aa, synthetic construct
GQKHTVDLTHHFHFRGNRVTEVRVHIVEVRSPEEAPAAGRESALRMGELSTPELLEAMLANLEAPGFRTVVTPGSISEEQIRQFLRRFYEALDSGDADTAASLFHPGVTIHLWDGVTFTSREEFREWFERLFSTSKDAWREIKSLEVRGDTVEVHVQLHFTLN

SEQ ID NO: 1692 - protein, 163 aa, synthetic construct
GQKHTVDLTHHFHFRGNRVTEVRVHIVEVESPEEAPAAGLRSAERMGELSDAELLAAMRARLAAPGFQTVVTPGSISEEQIRQFLRRFYEALDSGDADTAASLFHPGVTIHLWDGVTFTSREEFREWFERLFSTSKDAWREIKSLEVRGDTVEVHVQLHFTLN

SEQ ID NO: 1693 - protein, 163 aa, synthetic construct
GQKHTVDLTHHFHFRGNRVTEVRVHIVEVKSPEEAPEAALESVRRMEELSSAPLGEAMRALLAAPGFRTVVEPGSISEEQIRQFLRRFYEALDSGDADTAASLFHPGVTIHLWDGVTFTSREEFREWFERLFSTSKDAWREIKSLEVRGDTVEVHVQLHFTLN

SEQ ID NO: 1694 - protein, 163 aa, synthetic construct
GQKHTVDLTHHFHFRGNRVTEVRVHIVEVESEEQAPQAAVESARRGAELSDEALLEAMLANLAAPGFRTVVTPGSISEEQIRQFLRRFYEALDSGDADTAASLFHPGVTIHLWDGVTFTSREEFREWFERLFSTSKDAWREIKSLEVRGDTVEVHVQLHFTLN

SEQ ID NO: 1695 - protein, 163 aa, synthetic construct
GQKHTVDLTHHFHFRGNRVTEVRVHIVEVESEAEAPAAAVESARRGAELSDEALLEAMLANLAAPGFVETVTPGSISEEQIRQFLRRFYEALDSGDADTAASLFHPGVTIHLWDGVTFTSREEFREWFERLFSTSKDAWREIKSLEVRGDTVEVHVQLHFTLN

SEQ ID NO: 1696 - protein, 164 aa, synthetic construct
GQKHTVDLTHHFHFRGNRVTEVRVHINPTVDDEEEAEELAELLLELLLLLLLLLLLLLLLLLLLLLLLLLLLGGPRMSEEQIRQFLRRFYEALDSGDADTAASLFHPGVTIHLWDGVTFTSREEFREWFERLFSTSKDAWREIKSLEVRGDTVEVHVQLHFTLN

SEQ ID NO: 1697 - protein, 164 aa, synthetic construct
GQKHTVDLTHHFHFRGNRVTEVRVHIEEVENEEEAKRRSEERIELRRNLDERLGEDEPILGELARLREEAEGPPPEISEEQIRQFLRRFYEALDSGDADTAASLFHPGVTIHLWDGVTFTSREEFREWFERLFSTSKDAWREIKSLEVRGDTVEVHVQLHFTLN

SEQ ID NO: 1698 - protein, 164 aa, synthetic construct
GQKHTVDLTHHFHFRGNRVTEVRVHIEEVANEAEAEARAARAEELRARLEEALGEERPRLGALAELRARAAGPPPEISEEQIRQFLRRFYEALDSGDADTAASLFHPGVTIHLWDGVTFTSREEFREWFERLFSTSKDAWREIKSLEVRGDTVEVHVQLHFTLN

SEQ ID NO: 1699 - protein, 164 aa, synthetic construct
GQKHTVDLTHHFHFRGNRVTEVRVHITEVENEEEAEELAERRVRLREHLAEEAGRYTPELGYLAELRAAAAGPPAEISEEQIRQFLRRFYEALDSGDADTAASLFHPGVTIHLWDGVTFTSREEFREWFERLFSTSKDAWREIKSLEVRGDTVEVHVQLHFTLN

SEQ ID NO: 1700 - protein, 164 aa, synthetic construct
GQKHTVDLTHHFHFRGNRVTEVRVHIEEVENEEEAKERAEYRIELRRNLEERLDEDRPVLGYLRELRERAAGPPPEISEEQIRQFLRRFYEALDSGDADTAASLFHPGVTIHLWDGVTFTSREEFREWFERLFSTSKDAWREIKSLEVRGDTVEVHVQLHFTLN

SEQ ID NO: 1701 - protein, 164 aa, synthetic construct
GQKHTVDLTHHFHFRGNRVTEVRVHIIEVENEEEAERRAEERVELRRHLAEREGEDRPILGELAELRRRAEGPPPEISEEQIRQFLRRFYEALDSGDADTAASLFHPGVTIHLWDGVTFTSREEFREWFERLFSTSKDAWREIKSLEVRGDTVEVHVQLHFTLN

SEQ ID NO: 1702 - protein, 164 aa, synthetic construct
GQKHTVDLTHHFHFRGNRVTEVRVHITEVENEEEAEKLSERRRELLAHLDERAGEDKPILGELAELRARAEGPPREISEEQIRQFLRRFYEALDSGDADTAASLFHPGVTIHLWDGVTFTSREEFREWFERLFSTSKDAWREIKSLEVRGDTVEVHVQLHFTLN

SEQ ID NO: 1703 - protein, 164 aa, synthetic construct
GQKHTVDLTHHFHFRGNRVTEVRVHIEEVENEEEARRRSEELRELRANLEERAGEDRPRLGYLAELRRRAEGPPAEISEEQIRQFLRRFYEALDSGDADTAASLFHPGVTIHLWDGVTFTSREEFREWFERLFSTSKDAWREIKSLEVRGDTVEVHVQLHFTLN

SEQ ID NO: 1704 - protein, 164 aa, synthetic construct
GQKHTVDLTHHFHFRGNRVTEVRVHIEEVENEEEAERRAEERVRLRRHLDEEADRERPVLGYLRELRERAEGPPAEISEEQIRQFLRRFYEALDSGDADTAASLFHPGVTIHLWDGVTFTSREEFREWFERLFSTSKDAWREIKSLEVRGDTVEVHVQLHFTLN

SEQ ID NO: 1705 - protein, 164 aa, synthetic construct
GQKHTVDLTHHFHFRGNRVTEVRVHIEEVENEEEAEERAKEREELLENLEEELDKEKPVLGYLKELRERAEGPPAEISEEQIRQFLRRFYEALDSGDADTAASLFHPGVTIHLWDGVTFTSREEFREWFERLFSTSKDAWREIKSLEVRGDTVEVHVQLHFTLN

SEQ ID NO: 1706 - protein, 164 aa, synthetic construct
GQKHTVDLTHHFHFRGNRVTEVRVHIEEVENEEEARRLAERRRELLRRLEETAGEERPVLGYLRELRERAAGPPAEISEEQIRQFLRRFYEALDSGDADTAASLFHPGVTIHLWDGVTFTSREEFREWFERLFSTSKDAWREIKSLEVRGDTVEVHVQLHFTLN

SEQ ID NO: 1707 - protein, 164 aa, synthetic construct
GQKHTVDLTHHFHFRGNRVTEVRVHIEEVENEEEAERRSKERERLREHLDEELGRDTPRLGELAALRARAEGPPAEISEEQIRQFLRRFYEALDSGDADTAASLFHPGVTIHLWDGVTFTSREEFREWFERLFSTSKDAWREIKSLEVRGDTVEVHVQLHFTLN

SEQ ID NO: 1708 - protein, 164 aa, synthetic construct
GQKHTVDLTHHFHFRGNRVTEVRVHIEEVENEEEAKKRAEERERLRANLDEELGRETPVLGELAALRARAEGPPPEISEEQIRQFLRRFYEALDSGDADTAASLFHPGVTIHLWDGVTFTSREEFREWFERLFSTSKDAWREIKSLEVRGDTVEVHVQLHFTLN

SEQ ID NO: 1709 - protein, 164 aa, synthetic construct
GQKHTVDLTHHFHFRGNRVTEVRVHIEEVENEEEAEKLAEYRKELLENLEEEWDKDKPILGYLKELRERSRGPPPEISEEQIRQFLRRFYEALDSGDADTAASLFHPGVTIHLWDGVTFTSREEFREWFERLFSTSKDAWREIKSLEVRGDTVEVHVQLHFTLN

SEQ ID NO: 1710 - protein, 164 aa, synthetic construct
GQKHTVDLTHHFHFRGNRVTEVRVHIEEVENEEEAERLAEERRRLLAELDRRAGERRPVLGALAELRERAAGPPAEISEEQIRQFLRRFYEALDSGDADTAASLFHPGVTIHLWDGVTFTSREEFREWFERLFSTSKDAWREIKSLEVRGDTVEVHVQLHFTLN

SEQ ID NO: 1711 - protein, 164 aa, synthetic construct
GQKHTVDLTHHFHFRGNRVTEVRVHIEEVENEEEAKKLAEERVELREHLDERAGERRPVLGELAELRARAEGPPPEISEEQIRQFLRRFYEALDSGDADTAASLFHPGVTIHLWDGVTFTSREEFREWFERLFSTSKDAWREIKSLEVRGDTVEVHVQLHFTLN

SEQ ID NO: 1712 - protein, 164 aa, synthetic construct
GQKHTVDLTHHFHFRGNRVTEVRVHIEEVADEAEAERRAAEREERLARLEETAGEDRPVLGELAALRERAAGPPPEISEEQIRQFLRRFYEALDSGDADTAASLFHPGVTIHLWDGVTFTSREEFREWFERLFSTSKDAWREIKSLEVRGDTVEVHVQLHFTLN

SEQ ID NO: 1713 - protein, 164 aa, synthetic construct
GQKHTVDLTHHFHFRGNRVTEVRVHIEEVENEEEAKKRAEERQELRRNLDERAGENRPILGELAELRRRAEGPPAEISEEQIRQFLRRFYEALDSGDADTAASLFHPGVTIHLWDGVTFTSREEFREWFERLFSTSKDAWREIKSLEVRGDTVEVHVQLHFTLN

SEQ ID NO: 1714 - protein, 164 aa, synthetic construct
GQKHTVDLTHHFHFRGNRVTEVRVHIEEVADEAEAEKRAAERVRRLENLDEEAGRDRPILGHLAELRARAAGPPAEISEEQIRQFLRRFYEALDSGDADTAASLFHPGVTIHLWDGVTFTSREEFREWFERLFSTSKDAWREIKSLEVRGDTVEVHVQLHFTLN

SEQ ID NO: 1715 - protein, 164 aa, synthetic construct
GQKHTVDLTHHFHFRGNRVTEVRVHIIEVENEEEARERAERMQELRANLDERLGEERPILGYLAELRERAEGPPPEISEEQIRQFLRRFYEALDSGDADTAASLFHPGVTIHLWDGVTFTSREEFREWFERLFSTSKDAWREIKSLEVRGDTVEVHVQLHFTLN

SEQ ID NO: 1716 - protein, 164 aa, synthetic construct
GQKHTVDLTHHFHFRGNRVTEVRVHIEEVENEAEAERLAEERIERRRHLDETAGEDRPVLGELAELRERAAGPPAEISEEQIRQFLRRFYEALDSGDADTAASLFHPGVTIHLWDGVTFTSREEFREWFERLFSTSKDAWREIKSLEVRGDTVEVHVQLHFTLN

SEQ ID NO: 1717 - protein, 165 aa, synthetic construct
GQKHTVDLTHHFHFRGNRVTEVRVHINPTVDDEEEAEELREALRELLLLLLLLLLLLLLLLELLLELLLLLLEGGEPMSEEQIRQFLRRFYEALDSGDADTAASLFHPGVTIHLWDGVTFTSREEFREWFERLFSTSKDAWREIKSLEVRGDTVEVHVQLHFTLN

SEQ ID NO: 1718 - protein, 165 aa, synthetic construct
GQKHTVDLTHHFHFRGNRVTEVRVHIVELPNEEEAKKRAEEVKEEAKVGYTGFTDVPPLAAYRAELREIFAQAGAPSISEEQIRQFLRRFYEALDSGDADTAASLFHPGVTIHLWDGVTFTSREEFREWFERLFSTSKDAWREIKSLEVRGDTVEVHVQLHFTLN

SEQ ID NO: 1719 - protein, 165 aa, synthetic construct
GQKHTVDLTHHFHFRGNRVTEVRVHIVELPSEEEAEKRAEAVKEEAKTLYTGFTDRAPLAEYVAELAEIFATAGAPSISEEQIRQFLRRFYEALDSGDADTAASLFHPGVTIHLWDGVTFTSREEFREWFERLFSTSKDAWREIKSLEVRGDTVEVHVQLHFTLN

SEQ ID NO: 1720 - protein, 165 aa, synthetic construct
GQKHTVDLTHHFHFRGNRVTEVRVHIVDLPSEEEARRRAEEIRREAETLYTGLTDRPVLAAYRAELREIFAKAGAPTISEEQIRQFLRRFYEALDSGDADTAASLFHPGVTIHLWDGVTFTSREEFREWFERLFSTSKDAWREIKSLEVRGDTVEVHVQLHFTLN

SEQ ID NO: 1721 - protein, 165 aa, synthetic construct
GQKHTVDLTHHFHFRGNRVTEVRVHIRELPDEAAAEERAERVRREAEVGYEGFTDEPVFAAYRAELREVFATAGAPSITEEQIRQFLRRFYEALDSGDADTAASLFHPGVTIHLWDGVTFTSREEFREWFERLFSTSKDAWREIKSLEVRGDTVEVHVQLHFTLN

SEQ ID NO: 1722 - protein, 165 aa, synthetic construct
GQKHTVDLTHHFHFRGNRVTEVRVHIVELENEEEAEKRAEEIKEEAKTRYTGLTDRPVLAEFVAELREIHAKAGRPSISEEQIRQFLRRFYEALDSGDADTAASLFHPGVTIHLWDGVTFTSREEFREWFERLFSTSKDAWREIKSLEVRGDTVEVHVQLHFTLN

SEQ ID NO: 1723 - protein, 165 aa, synthetic construct
GQKHTVDLTHHFHFRGNRVTEVRVHIVELPNEAEAEKRAAEWKEEAKVRYTGFTDVPPLAAYVAELKEIFAKAGNPSISEEQIRQFLRRFYEALDSGDADTAASLFHPGVTIHLWDGVTFTSREEFREWFERLFSTSKDAWREIKSLEVRGDTVEVHVQLHFTLN

SEQ ID NO: 1724 - protein, 165 aa, synthetic construct
GQKHTVDLTHHFHFRGNRVTEVRVHIVELENEAEAEERAAAIREEAAVRYTGFTDRPPLAAYVAELREVFARAGSPSISEEQIRQFLRRFYEALDSGDADTAASLFHPGVTIHLWDGVTFTSREEFREWFERLFSTSKDAWREIKSLEVRGDTVEVHVQLHFTLN

SEQ ID NO: 1725 - protein, 165 aa, synthetic construct
GQKHTVDLTHHFHFRGNRVTEVRVHIVELPNEEEAEELAAEIREEAKTRYTGFTHRPVLAAYVAELREIFARAGRPSISEEQIRQFLRRFYEALDSGDADTAASLFHPGVTIHLWDGVTFTSREEFREWFERLFSTSKDAWREIKSLEVRGDTVEVHVQLHFTLN

SEQ ID NO: 1726 - protein, 165 aa, synthetic construct
GQKHTVDLTHHFHFRGNRVTEVRVHIVELPNEEEAEKWAEEVKAEAAVRYTGFTERPPLAEYVAELREVFATAGAPSISEEQIRQFLRRFYEALDSGDADTAASLFHPGVTIHLWDGVTFTSREEFREWFERLFSTSKDAWREIKSLEVRGDTVEVHVQLHFTLN

SEQ ID NO: 1727 - protein, 165 aa, synthetic construct
GQKHTVDLTHHFHFRGNRVTEVRVHILELENEEEAEKLAEEIKEEAKVGYEGLKERPVFAEYRAELKEIFAKAGNPEISEEQIRQFLRRFYEALDSGDADTAASLFHPGVTIHLWDGVTFTSREEFREWFERLFSTSKDAWREIKSLEVRGDTVEVHVQLHFTLN

SEQ ID NO: 1728 - protein, 165 aa, synthetic construct
GQKHTVDLTHHFHFRGNRVTEVRVHIVELPSEEEAERRAEEIKEEAKVRYQGFTDVPPLAAYVAELREIFARAGAPSISEEQIRQFLRRFYEALDSGDADTAASLFHPGVTIHLWDGVTFTSREEFREWFERLFSTSKDAWREIKSLEVRGDTVEVHVQLHFTLN

SEQ ID NO: 1729 - protein, 165 aa, synthetic construct
GQKHTVDLTHHFHFRGNRVTEVRVHIVELESEEEAERRAEEIKEEAKTRYTGFRDRPVLAEYVAELREIFAKAGRPSISEEQIRQFLRRFYEALDSGDADTAASLFHPGVTIHLWDGVTFTSREEFREWFERLFSTSKDAWREIKSLEVRGDTVEVHVQLHFTLN

SEQ ID NO: 1730 - protein, 165 aa, synthetic construct
GQKHTVDLTHHFHFRGNRVTEVRVHIVELPSEEEAERRAAEIREEAAVLYTGFTDVPPLAAFVAELREIFAKAGKPSISEEQIRQFLRRFYEALDSGDADTAASLFHPGVTIHLWDGVTFTSREEFREWFERLFSTSKDAWREIKSLEVRGDTVEVHVQLHFTLN

SEQ ID NO: 1731 - protein, 165 aa, synthetic construct
GQKHTVDLTHHFHFRGNRVTEVRVHIVELPNEEEAERRAAEIAEEAKVRYTGFTDRPVLAAYVAELKEIFAKAGKPSISEEQIRQFLRRFYEALDSGDADTAASLFHPGVTIHLWDGVTFTSREEFREWFERLFSTSKDAWREIKSLEVRGDTVEVHVQLHFTLN

SEQ ID NO: 1732 - protein, 165 aa, synthetic construct
GQKHTVDLTHHFHFRGNRVTEVRVHIVELPDEAEAERRAEAIRAEAAVGYTGFTEVPPLAAYVAELREVHARAGAPSISEEQIRQFLRRFYEALDSGDADTAASLFHPGVTIHLWDGVTFTSREEFREWFERLFSTSKDAWREIKSLEVRGDTVEVHVQLHFTLN

SEQ ID NO: 1733 - protein, 165 aa, synthetic construct
GQKHTVDLTHHFHFRGNRVTEVRVHIVELPNEEEAEKRKEEIKEEAKVRYEGFTDVPPFAAYRAELREVFAAAGAPSISEEQIRQFLRRFYEALDSGDADTAASLFHPGVTIHLWDGVTFTSREEFREWFERLFSTSKDAWREIKSLEVRGDTVEVHVQLHFTLN

SEQ ID NO: 1734 - protein, 165 aa, synthetic construct
GQKHTVDLTHHFHFRGNRVTEVRVHIVELPSEEEAERRAAEIREEAATLYAGRRDVPPLAAYRAALREEFARAGAPSISEEQIRQFLRRFYEALDSGDADTAASLFHPGVTIHLWDGVTFTSREEFREWFERLFSTSKDAWREIKSLEVRGDTVEVHVQLHFTLN

SEQ ID NO: 1735 - protein, 165 aa, synthetic construct
GQKHTVDLTHHFHFRGNRVTEVRVHIVELPDEATAEALAERIRAEAATRYTGFTDRPPLARYVAELREIFATAGNPSISEEQIRQFLRRFYEALDSGDADTAASLFHPGVTIHLWDGVTFTSREEFREWFERLFSTSKDAWREIKSLEVRGDTVEVHVQLHFTLN

SEQ ID NO: 1736 - protein, 165 aa, synthetic construct
GQKHTVDLTHHFHFRGNRVTEVRVHIVELPNEEEARERAEEIKREAEVRYTGFRERPPLAEYVAELREIFAQAGNPSISEEQIRQFLRRFYEALDSGDADTAASLFHPGVTIHLWDGVTFTSREEFREWFERLFSTSKDAWREIKSLEVRGDTVEVHVQLHFTLN

SEQ ID NO: 1737 - protein, 165 aa, synthetic construct
GQKHTVDLTHHFHFRGNRVTEVRVHIVELENEEEAEELAKRIREEAKTRYTGLTDRPVLAEYVAELREVFATAGAPSISEEQIRQFLRRFYEALDSGDADTAASLFHPGVTIHLWDGVTFTSREEFREWFERLFSTSKDAWREIKSLEVRGDTVEVHVQLHFTLN

SEQ ID NO: 1738 - protein, 166 aa, synthetic construct
GQKHTVDLTHHFHFRGNRVTEVRVHINPTVDDEEEAEELLELLRELLLLLLLLLLLLLLLLLLLLLLLLLLLELGGEPMSEEQIRQFLRRFYEALDSGDADTAASLFHPGVTIHLWDGVTFTSREEFREWFERLFSTSKDAWREIKSLEVRGDTVEVHVQLHFTLN

SEQ ID NO: 1739 - protein, 166 aa, synthetic construct
GQKHTVDLTHHFHFRGNRVTEVRVHILELPNEEEAERIAERWREDLETGRELERELADVLAESAELLEEREARGGAREISEEQIRQFLRRFYEALDSGDADTAASLFHPGVTIHLWDGVTFTSREEFREWFERLFSTSKDAWREIKSLEVRGDTVEVHVQLHFTLN

SEQ ID NO: 1740 - protein, 166 aa, synthetic construct
GQKHTVDLTHHFHFRGNRVTEVRVHILELPNEAEAERVAEEWRRDLETGRELELRHADVLAESAELRERMEAEGGEREISEEQIRQFLRRFYEALDSGDADTAASLFHPGVTIHLWDGVTFTSREEFREWFERLFSTSKDAWREIKSLEVRGDTVEVHVQLHFTLN

SEQ ID NO: 1741 - protein, 166 aa, synthetic construct
GQKHTVDLTHHFHFRGNRVTEVRVHILELPNEAEAEEIAEAWKAELETGGELHRRHADVLAESAALLDERRARGGRREISEEQIRQFLRRFYEALDSGDADTAASLFHPGVTIHLWDGVTFTSREEFREWFERLFSTSKDAWREIKSLEVRGDTVEVHVQLHFTLN

SEQ ID NO: 1742 - protein, 166 aa, synthetic construct
GQKHTVDLTHHFHFRGNRVTEVRVHILELPDEARAEEIAAAWKADLETGRELERRYADVLAESAELRERMEAEGGEREISEEQIRQFLRRFYEALDSGDADTAASLFHPGVTIHLWDGVTFTSREEFREWFERLFSTSKDAWREIKSLEVRGDTVEVHVQLHFTLN

SEQ ID NO: 1743 - protein, 166 aa, synthetic construct
GQKHTVDLTHHFHFRGNRVTEVRVHILELENEEEAEKIAKAWLEELETGEKLYEEHREVLAESAELRRRQRAEGGEREISEEQIRQFLRRFYEALDSGDADTAASLFHPGVTIHLWDGVTFTSREEFREWFERLFSTSKDAWREIKSLEVRGDTVEVHVQLHFTLN

SEQ ID NO: 1744 - protein, 166 aa, synthetic construct
GQKHTVDLTHHFHFRGNRVTEVRVHILELPNEEEAEKIAAEVKEELETGRELYRKYADVLAESAELEDERIARGGRREISEEQIRQFLRRFYEALDSGDADTAASLFHPGVTIHLWDGVTFTSREEFREWFERLFSTSKDAWREIKSLEVRGDTVEVHVQLHFTLN

SEQ ID NO: 1745 - protein, 166 aa, synthetic construct
GQKHTVDLTHHFHFRGNRVTEVRVHILELPNEAEAEEISERWLEELETGRELYREHADVLAASAELWEEMEAAGGRREISEEQIRQFLRRFYEALDSGDADTAASLFHPGVTIHLWDGVTFTSREEFREWFERLFSTSKDAWREIKSLEVRGDTVEVHVQLHFTLN

SEQ ID NO: 1746 - protein, 166 aa, synthetic construct
GQKHTVDLTHHFHFRGNRVTEVRVHILELENEAEAEEIAERWREDLERGRELELELRDVLSEMAELRERMEAEGGRREISEEQIRQFLRRFYEALDSGDADTAASLFHPGVTIHLWDGVTFTSREEFREWFERLFSTSKDAWREIKSLEVRGDTVEVHVQLHFTLN

SEQ ID NO: 1747 - protein, 166 aa, synthetic construct
GQKHTVDLTHHFHFRGNRVTEVRVHILELPNEEEAERIAEEVERERETGRELYREHADVLAESAELREEMEARGGRREISEEQIRQFLRRFYEALDSGDADTAASLFHPGVTIHLWDGVTFTSREEFREWFERLFSTSKDAWREIKSLEVRGDTVEVHVQLHFTLN

SEQ ID NO: 1748 - protein, 166 aa, synthetic construct
GQKHTVDLTHHFHFRGNRVTEVRVHILELPNEEEAKKIAERWLEELETGRELYREFSDVLAESAELREEMEARGGRREISEEQIRQFLRRFYEALDSGDADTAASLFHPGVTIHLWDGVTFTSREEFREWFERLFSTSKDAWREIKSLEVRGDTVEVHVQLHFTLN

SEQ ID NO: 1749 - protein, 166 aa, synthetic construct
GQKHTVDLTHHFHFRGNRVTEVRVHILELPDEAEAERIAEEWRAELETGGELERRHADVLAESAALREERRARGGRREISEEQIRQFLRRFYEALDSGDADTAASLFHPGVTIHLWDGVTFTSREEFREWFERLFSTSKDAWREIKSLEVRGDTVEVHVQLHFTLN

SEQ ID NO: 1750 - protein, 166 aa, synthetic construct
GQKHTVDLTHHFHFRGNRVTEVRVHILELENEEEAKKIAEEVKAELETGGELYRKYSDVLSESAALLEERRASGGRREISEEQIRQFLRRFYEALDSGDADTAASLFHPGVTIHLWDGVTFTSREEFREWFERLFSTSKDAWREIKSLEVRGDTVEVHVQLHFTLN

SEQ ID NO: 1751 - protein, 166 aa, synthetic construct
GQKHTVDLTHHFHFRGNRVTEVRVHILEVENEEEAERLAERWREDLETGRELERELADVLAESAELRDRMEAEGGAREISEEQIRQFLRRFYEALDSGDADTAASLFHPGVTIHLWDGVTFTSREEFREWFERLFSTSKDAWREIKSLEVRGDTVEVHVQLHFTLN

SEQ ID NO: 1752 - protein, 166 aa, synthetic construct
GQKHTVDLTHHFHFRGNRVTEVRVHILELENEAEAEEIAERVLADLETGRELEEELSDVFSESAELRKRMEAEGGEREISEEQIRQFLRRFYEALDSGDADTAASLFHPGVTIHLWDGVTFTSREEFREWFERLFSTSKDAWREIKSLEVRGDTVEVHVQLHFTLN

SEQ ID NO: 1753 - protein, 166 aa, synthetic construct
GQKHTVDLTHHFHFRGNRVTEVRVHILELANEAEAEEIAERVREELETGGELHREHADVLAESAALEEERRAAGGAREISEEQIRQFLRRFYEALDSGDADTAASLFHPGVTIHLWDGVTFTSREEFREWFERLFSTSKDAWREIKSLEVRGDTVEVHVQLHFTLN

SEQ ID NO: 1754 - protein, 166 aa, synthetic construct
GQKHTVDLTHHFHFRGNRVTEVRVHILELPNEEEAEEIAERWKEDLETGGELEEELADVLAESAELRRERIARGGRREISEEQIRQFLRRFYEALDSGDADTAASLFHPGVTIHLWDGVTFTSREEFREWFERLFSTSKDAWREIKSLEVRGDTVEVHVQLHFTLN

SEQ ID NO: 1755 - protein, 166 aa, synthetic construct
GQKHTVDLTHHFHFRGNRVTEVRVHILELENEEEAKKISEAWEKEKETGRELYREYADVLAESAELWERREAEGGEREISEEQIRQFLRRFYEALDSGDADTAASLFHPGVTIHLWDGVTFTSREEFREWFERLFSTSKDAWREIKSLEVRGDTVEVHVQLHFTLN

SEQ ID NO: 1756 - protein, 166 aa, synthetic construct
GQKHTVDLTHHFHFRGNRVTEVRVHILELENEEEAKEIAERVKEELETGGELYRELGEVLSESAELLEERRALGGEREISEEQIRQFLRRFYEALDSGDADTAASLFHPGVTIHLWDGVTFTSREEFREWFERLFSTSKDAWREIKSLEVRGDTVEVHVQLHFTLN

SEQ ID NO: 1757 - protein, 166 aa, synthetic construct
GQKHTVDLTHHFHFRGNRVTEVRVHILELPNEAEAEKIAAEVERELETGRELYLKHRDVLSESAELEEEREALGGEREISEEQIRQFLRRFYEALDSGDADTAASLFHPGVTIHLWDGVTFTSREEFREWFERLFSTSKDAWREIKSLEVRGDTVEVHVQLHFTLN

SEQ ID NO: 1758 - protein, 166 aa, synthetic construct
GQKHTVDLTHHFHFRGNRVTEVRVHILELENEEEAEEIAKRWEEEKETGRELYRELGDVLSESAELLDRREAEGGEREISEEQIRQFLRRFYEALDSGDADTAASLFHPGVTIHLWDGVTFTSREEFREWFERLFSTSKDAWREIKSLEVRGDTVEVHVQLHFTLN

SEQ ID NO: 1759 - protein, 167 aa, synthetic construct
GQKHTVDLTHHFHFRGNRVTEVRVHINPTVDDEEEAEELAELLLELLLLLLLLLLLLLLLLELLLLLLLLLLLLLEAPPMSEEQIRQFLRRFYEALDSGDADTAASLFHPGVTIHLWDGVTFTSREEFREWFERLFSTSKDAWREIKSLEVRGDTVEVHVQLHFTLN

SEQ ID NO: 1760 - protein, 167 aa, synthetic construct
GQKHTVDLTHHFHFRGNRVTEVRVHIIEVENEEEAERVSALLEEILANRGRLWDRLGLNPEWTRAHREAALAARTRPATLSEEQIRQFLRRFYEALDSGDADTAASLFHPGVTIHLWDGVTFTSREEFREWFERLFSTSKDAWREIKSLEVRGDTVEVHVQLHFTLN

SEQ ID NO: 1761 - protein, 167 aa, synthetic construct
GQKHTVDLTHHFHFRGNRVTEVRVHIIPVENEEEAERLSAERRRILANRGELWDSLGLNREWEEEHRARWLAARTRPATLSEEQIRQFLRRFYEALDSGDADTAASLFHPGVTIHLWDGVTFTSREEFREWFERLFSTSKDAWREIKSLEVRGDTVEVHVQLHFTLN

SEQ ID NO: 1762 - protein, 167 aa, synthetic construct
GQKHTVDLTHHFHFRGNRVTEVRVHIVPVKDEAEAEKVSEERIEILKNRGKLYDKLGEGKEWEEEFRKRWLEAEKRPATLSEEQIRQFLRRFYEALDSGDADTAASLFHPGVTIHLWDGVTFTSREEFREWFERLFSTSKDAWREIKSLEVRGDTVEVHVQLHFTLN

SEQ ID NO: 1763 - protein, 167 aa, synthetic construct
GQKHTVDLTHHFHFRGNRVTEVRVHIIPVENEEEAERVAAQREEILANRGTLWDTLGENAEWERAFYEAWLAAETRAPTLSEEQIRQFLRRFYEALDSGDADTAASLFHPGVTIHLWDGVTFTSREEFREWFERLFSTSKDAWREIKSLEVRGDTVEVHVQLHFTLN

SEQ ID NO: 1764 - protein, 167 aa, synthetic construct
GQKHTVDLTHHFHFRGNRVTEVRVHITEVENEEEAEEVAARRRRILAHRGELLDELGENEEWQRELRERWLAARTRPATLSEEQIRQFLRRFYEALDSGDADTAASLFHPGVTIHLWDGVTFTSREEFREWFERLFSTSKDAWREIKSLEVRGDTVEVHVQLHFTLN

SEQ ID NO: 1765 - protein, 167 aa, synthetic construct
GQKHTVDLTHHFHFRGNRVTEVRVHITPVENEEEAKKLSEKRIEILKHRGELYDELGLGKEWEEEFRARWLEAETREPTLSEEQIRQFLRRFYEALDSGDADTAASLFHPGVTIHLWDGVTFTSREEFREWFERLFSTSKDAWREIKSLEVRGDTVEVHVQLHFTLN

SEQ ID NO: 1766 - protein, 167 aa, synthetic construct
GQKHTVDLTHHFHFRGNRVTEVRVHIIPVENEAEAERISARRRRILAHRGELEDELGENEEWEAEFAARWREARTRPATLSEEQIRQFLRRFYEALDSGDADTAASLFHPGVTIHLWDGVTFTSREEFREWFERLFSTSKDAWREIKSLEVRGDTVEVHVQLHFTLN

SEQ ID NO: 1767 - protein, 167 aa, synthetic construct
GQKHTVDLTHHFHFRGNRVTEVRVHITEVENEEEAKKVSELRKEILENRGELWDKLKENEEWEQEFLERWLEAREREPTLSEEQIRQFLRRFYEALDSGDADTAASLFHPGVTIHLWDGVTFTSREEFREWFERLFSTSKDAWREIKSLEVRGDTVEVHVQLHFTLN

SEQ ID NO: 1768 - protein, 167 aa, synthetic construct
GQKHTVDLTHHFHFRGNRVTEVRVHIIPVENEAEAERVAEERERILAHRGELEEALGLNEEWEREHLERWLEARTRAPTLSEEQIRQFLRRFYEALDSGDADTAASLFHPGVTIHLWDGVTFTSREEFREWFERLFSTSKDAWREIKSLEVRGDTVEVHVQLHFTLN

SEQ ID NO: 1769 - protein, 167 aa, synthetic construct
GQKHTVDLTHHFHFRGNRVTEVRVHIIEVENEEEAEKVSERRKRILENRGELWDELGENEEWEREHLERALEAESRAPTLSEEQIRQFLRRFYEALDSGDADTAASLFHPGVTIHLWDGVTFTSREEFREWFERLFSTSKDAWREIKSLEVRGDTVEVHVQLHFTLN

SEQ ID NO: 1770 - protein, 167 aa, synthetic construct
GQKHTVDLTHHFHFRGNRVTEVRVHIIPVADEAEAAEVAARRERILAHRGELEDELGENAPWEEEHRARWLEAQTRAPSLSEEQIRQFLRRFYEALDSGDADTAASLFHPGVTIHLWDGVTFTSREEFREWFERLFSTSKDAWREIKSLEVRGDTVEVHVQLHFTLN

SEQ ID NO: 1771 - protein, 167 aa, synthetic construct
GQKHTVDLTHHFHFRGNRVTEVRVHIIPVENEEEAEKVSERRRRILENRGELLDELGENEEWERELRERWLAARTRPPTLSEEQIRQFLRRFYEALDSGDADTAASLFHPGVTIHLWDGVTFTSREEFREWFERLFSTSKDAWREIKSLEVRGDTVEVHVQLHFTLN

SEQ ID NO: 1772 - protein, 167 aa, synthetic construct
GQKHTVDLTHHFHFRGNRVTEVRVHIIPVENEEEAEEVAERRERILAHRGELYDELGENKEWEEELREIWLEAETREPTLSEEQIRQFLRRFYEALDSGDADTAASLFHPGVTIHLWDGVTFTSREEFREWFERLFSTSKDAWREIKSLEVRGDTVEVHVQLHFTLN

SEQ ID NO: 1773 - protein, 167 aa, synthetic construct
GQKHTVDLTHHFHFRGNRVTEVRVHIIEVENEEEAEEVSKKREEILAHRGELLDELGENEEWERELRERWLAARERAPTLSEEQIRQFLRRFYEALDSGDADTAASLFHPGVTIHLWDGVTFTSREEFREWFERLFSTSKDAWREIKSLEVRGDTVEVHVQLHFTLN

SEQ ID NO: 1774 - protein, 167 aa, synthetic construct
GQKHTVDLTHHFHFRGNRVTEVRVHIIPVENEEEAERLSEERIRILEHRGELEDELGLNEEWEEWFRERWLEAVEREPSLSEEQIRQFLRRFYEALDSGDADTAASLFHPGVTIHLWDGVTFTSREEFREWFERLFSTSKDAWREIKSLEVRGDTVEVHVQLHFTLN

SEQ ID NO: 1775 - protein, 167 aa, synthetic construct
GQKHTVDLTHHFHFRGNRVTEVRVHIIEVENEEEAEEISEKRKEILENRGKLWDKLKENEEWQQEFRDRWLEAETREPTLSEEQIRQFLRRFYEALDSGDADTAASLFHPGVTIHLWDGVTFTSREEFREWFERLFSTSKDAWREIKSLEVRGDTVEVHVQLHFTLN

SEQ ID NO: 1776 - protein, 167 aa, synthetic construct
GQKHTVDLTHHFHFRGNRVTEVRVHIIEVENEEEAKEVSERRIEILENRGELWDELGENEEWEEELYERWLEAEEREPTLSEEQIRQFLRRFYEALDSGDADTAASLFHPGVTIHLWDGVTFTSREEFREWFERLFSTSKDAWREIKSLEVRGDTVEVHVQLHFTLN

SEQ ID NO: 1777 - protein, 167 aa, synthetic construct
GQKHTVDLTHHFHFRGNRVTEVRVHIIEVENEEEAEKLSEKRKEILANRGKLYDSLGLNAEWEKELYERWLEAETREPTLSEEQIRQFLRRFYEALDSGDADTAASLFHPGVTIHLWDGVTFTSREEFREWFERLFSTSKDAWREIKSLEVRGDTVEVHVQLHFTLN

SEQ ID NO: 1778 - protein, 167 aa, synthetic construct
GQKHTVDLTHHFHFRGNRVTEVRVHITPVENEEEAEKVAEERKRILAHRGELLDELGLNEPWEAELRALWLEAETRAPTLTEEQIRQFLRRFYEALDSGDADTAASLFHPGVTIHLWDGVTFTSREEFREWFERLFSTSKDAWREIKSLEVRGDTVEVHVQLHFTLN

SEQ ID NO: 1779 - protein, 167 aa, synthetic construct
GQKHTVDLTHHFHFRGNRVTEVRVHIEPVENEEEAERLAERRRELLARRGELLDELGLNPEWEEWLRARWLEAETRAPTLSEEQIRQFLRRFYEALDSGDADTAASLFHPGVTIHLWDGVTFTSREEFREWFERLFSTSKDAWREIKSLEVRGDTVEVHVQLHFTLN

SEQ ID NO: 1780 - protein, 127 aa, synthetic construct
GQKHEVTLVHRFRFRGNRVTEVEVRIFPLEGPEAEGEGPGPEEQIRQFLRRFYEALDSGDADTAASLFHPGVTIHLWDGVTFTSREEFREWFERLFSTSKDAWREIVRLEVRGDTVVVVVRLTFTLN

SEQ ID NO: 1781 - protein, 127 aa, synthetic construct
GQKHTVTLVHRFRFRGNRVTEVEVEIFPAEGPEAEGEGPGPEEQIRQFLRRFYEALDSGDADTAASLFHPGVTIHLWDGVTFTSREEFREWFERLFSTSKDAWRRIVELRVVGDTVVVVVELEFTLN

SEQ ID NO: 1782 - protein, 127 aa, synthetic construct
GQKHTVTLLHRFRFRGNRVTEVEVRIFPLEGPEAEPEGPGPEEQIRQFLRRFYEALDSGDADTAASLFHPGVTIHLWDGVTFTSREEFREWFERLFSTSKDAWREIEELRVRGDTVVVRVRLDFTLN

SEQ ID NO: 1783 - protein, 127 aa, synthetic construct
GQKHVVTLVHRFVFRGNRVTEVEVRIFPLEGPEAEPEGPGPEEQIRQFLRRFYEALDSGDADTAASLFHPGVTIHLWDGVTFTSREEFREWFERLFSTSKDAWRRIVRLRVEGDTVVVVVELEFTLN

SEQ ID NO: 1784 - protein, 127 aa, synthetic construct
GQKHTVTLVHRFRFRGNRVTEVEVRIYPLEGPEAEGEGPGPEEQIRQFLRRFYEALDSGDADTAASLFHPGVTIHLWDGVTFTSREEFREWFERLFSTSKDAWRHIERLEVRGDTVVVVVRLEFTLN

SEQ ID NO: 1785 - protein, 127 aa, synthetic construct
GQKHEVTLVHVFEFRGNRVTEVRVEIFPLEGPEAEGEGPGPEEQIRQFLRRFYEALDSGDADTAASLFHPGVTIHLWDGVTFTSREEFREWFERLFSTSKDAWREIERLEVRGDTVVVVVRLTFTLN

SEQ ID NO: 1786 - protein, 127 aa, synthetic construct
GQKHVVTLVHEFRFRGNRVTEVRVRIFPEEGPEARPEGPGPEEQIRQFLRRFYEALDSGDADTAASLFHPGVTIHLWDGVTFTSREEFREWFERLFSTSKDAWREIVRLEVRGDTVVVVVRLTFTLN

SEQ ID NO: 1787 - protein, 127 aa, synthetic construct
GQKHRVTLVHRFEFRGNRVTRVTVTITPLEGPEAEPEGPGPEEQIRQFLRRFYEALDSGDADTAASLFHPGVTIHLWDGVTFTSREEFREWFERLFSTSKDAWRRIVRLEVRGDTVVVVVELEFTLN

SEQ ID NO: 1788 - protein, 127 aa, synthetic construct
GQKHEVTLVHRFRFRGNRVTEVRVEIYPLAGPEAEPEGPGPEEQIRQFLRRFYEALDSGDADTAASLFHPGVTIHLWDGVTFTSREEFREWFERLFSTSKDAWREIVELRVVGDTVVVVVRLRFTLN

SEQ ID NO: 1789 - protein, 127 aa, synthetic construct
GQKHEVTLVHRFRFRGNRVTEVEVEIFPLEGPEAEPEGPGPEEQIRQFLRRFYEALDSGDADTAASLFHPGVTIHLWDGVTFTSREEFREWFERLFSTSKDAWREIVRLEVRGDTVVVVVRLTFTLN

SEQ ID NO: 1790 - protein, 127 aa, synthetic construct
GQKHTVTLVHRFRFRGNRVTEVEVRIEPLSGPEAEPEGPGPEEQIRQFLRRFYEALDSGDADTAASLFHPGVTIHLWDGVTFTSREEFREWFERLFSTSKDAWREIERLEVRGDTVVVVVRLDFTLN

SEQ ID NO: 1791 - protein, 127 aa, synthetic construct
GQKHRVTLVHRFRFRGNRVTEVEVEIFPLEGPEAEPEGPGPEEQIRQFLRRFYEALDSGDADTAASLFHPGVTIHLWDGVTFTSREEFREWFERLFSTSKDAWRRIVRLRVRGDTVVVVVELTFTLN

SEQ ID NO: 1792 - protein, 127 aa, synthetic construct
GQKHRVTLVHRFRFRGNRVTEVEVRIYPLEGPEAEPEGPGPEEQIRQFLRRFYEALDSGDADTAASLFHPGVTIHLWDGVTFTSREEFREWFERLFSTSKDAWRRIVRLRVRGDTVVVVVELEFTLN

SEQ ID NO: 1793 - protein, 127 aa, synthetic construct
GQKHEVTLLHRFRFRGNRVTEVEVRIFPLEGPEGEGEGPGPEEQIRQFLRRFYEALDSGDADTAASLFHPGVTIHLWDGVTFTSREEFREWFERLFSTSKDAWREIVRLRVRGDTVVVVVRLTFTLN

SEQ ID NO: 1794 - protein, 127 aa, synthetic construct
GQKHTVTLVHRFRFRGNRVTEVEVRIFPKEGPEAEGEGPGPEEQIRQFLRRFYEALDSGDADTAASLFHPGVTIHLWDGVTFTSREEFREWFERLFSTSKDAWRRIVRLEVRGDTVVVVVELEFTLN

SEQ ID NO: 1795 - protein, 127 aa, synthetic construct
GQKHVVTLVHRFEFRGNRVTRVEVRIFPLEGPEAEPEGPGPEEQIRQFLRRFYEALDSGDADTAASLFHPGVTIHLWDGVTFTSREEFREWFERLFSTSKDAWRRIERLEVRGDTVVVVVRLEFTLN

SEQ ID NO: 1796 - protein, 127 aa, synthetic construct
GQKHVVTLLHRFRFRGNRVTEVEVRIEPESGPEGEGEGPGPEEQIRQFLRRFYEALDSGDADTAASLFHPGVTIHLWDGVTFTSREEFREWFERLFSTSKDAWREIERLEVRGDTVVVRVRLEFTLN

SEQ ID NO: 1797 - protein, 127 aa, synthetic construct
GQKHEVTLLHRFRFRGNRVTEVEVRIEPLSGPEGEPEGPGPEEQIRQFLRRFYEALDSGDADTAASLFHPGVTIHLWDGVTFTSREEFREWFERLFSTSKDAWREIVELKVEGDTVVVRVRLTFTLN

SEQ ID NO: 1798 - protein, 127 aa, synthetic construct
GQKHRVTLVHRFRFRGNRVTEVEVRIYPLEGPEAEGEGPGPEEQIRQFLRRFYEALDSGDADTAASLFHPGVTIHLWDGVTFTSREEFREWFERLFSTSKDAWRRIVRLEVRGDTVVVVVELEFTLN

SEQ ID NO: 1799 - protein, 127 aa, synthetic construct
GQKHTVTLVHVFRFRGNRVTEVRVEIFPLEGPEAEGEGPGPEEQIRQFLRRFYEALDSGDADTAASLFHPGVTIHLWDGVTFTSREEFREWFERLFSTSKDAWRRIVRLRVEGDTVVVVVELEFTLN

SEQ ID NO: 1800 - protein, 128 aa, synthetic construct
GQKHTVTLLHVFRFRGNRVTEVEVEIFPAGPRPTREGEGSLSEEQIRQFLRRFYEALDSGDADTAASLFHPGVTIHLWDGVTFTSREEFREWFERLFSTSKDAWRRIVRLEVNGDTVVVVVELEFTLN

SEQ ID NO: 1801 - protein, 128 aa, synthetic construct
GQKHTVTLHHHFVFRGNRVTEVEVRIVPDAELPTTEGTGSLSEEQIRQFLRRFYEALDSGDADTAASLFHPGVTIHLWDGVTFTSREEFREWFERLFSTSKDAWREIVRLDVNGDTVSVVVRLTFTLN

SEQ ID NO: 1802 - protein, 128 aa, synthetic construct
GQKHTVTLLHWFRFRGNRVTEVEVEIVPDGEEPTREGSGSLSEEQIRQFLRRFYEALDSGDADTAASLFHPGVTIHLWDGVTFTSREEFREWFERLFSTSKDAWREIVRLDVNGDTVYVVVRLEFTLN

SEQ ID NO: 1803 - protein, 128 aa, synthetic construct
GQKHTVYLHHRFVFRGNRVTEVEVEIYPEEERPFSEGEGSLSEEQIRQFLRRFYEALDSGDADTAASLFHPGVTIHLWDGVTFTSREEFREWFERLFSTSKDAWREILELRVNGDTVDVLVRLTFTLN

SEQ ID NO: 1804 - protein, 128 aa, synthetic construct
GQKHTVHLLHVFVFRGNRVTEVRVEIYPDGPRPREEGSGSLSEEQIRQFLRRFYEALDSGDADTAASLFHPGVTIHLWDGVTFTSREEFREWFERLFSTSKDAWRHIEELDVNGDTVVVRVTLEFTLN

SEQ ID NO: 1805 - protein, 128 aa, synthetic construct
GQKHTVRLLHTFVFRGNRVTEVRVEIFPEEERPTREGSGSLSEEQIRQFLRRFYEALDSGDADTAASLFHPGVTIHLWDGVTFTSREEFREWFERLFSTSKDAWRHIERLEVNGDTVNVVVTLEFTLN

SEQ ID NO: 1806 - protein, 128 aa, synthetic construct
GQKHTVTLLHVFRFRGNRVTEVRVEIFPEGERPREEGEGSLSEEQIRQFLRRFYEALDSGDADTAASLFHPGVTIHLWDGVTFTSREEFREWFERLFSTSKDAWRRIEELDVRGDTVTVVVTLEFTLN

SEQ ID NO: 1807 - protein, 128 aa, synthetic construct
GQKHTVYLLHVFHFRGNRVTRVEVRIFPAGELPTEEGSGSLSEEQIRQFLRRFYEALDSGDADTAASLFHPGVTIHLWDGVTFTSREEFREWFERLFSTSKDAWRRILRLDVRGDTVSVVVELEFTLN

SEQ ID NO: 1808 - protein, 128 aa, synthetic construct
GQKHTVTLHHHFVFRGNRVTEVRVEIYPEGPEPTTEGTGSLSEEQIRQFLRRFYEALDSGDADTAASLFHPGVTIHLWDGVTFTSREEFREWFERLFSTSKDAWREIVRLDVNGDTVSVVVRLEFTLN

SEQ ID NO: 1809 - protein, 128 aa, synthetic construct
GQKHTVTLLHHFVFRGNRVTEVRVEIFPDGPEPTREGRGSLSEEQIRQFLRRFYEALDSGDADTAASLFHPGVTIHLWDGVTFTSREEFREWFERLFSTSKDAWREIVRLDVNGDTVDVVVRLTFTLN

SEQ ID NO: 1810 - protein, 128 aa, synthetic construct
GQKHVVTLLHTFVFRGNRVTEVEVEIFPEEEEPTREGSGSLSEEQIRQFLRRFYEALDSGDADTAASLFHPGVTIHLWDGVTFTSREEFREWFERLFSTSKDAWREIVRLEVNGDTVTVVVRLTFTLN

SEQ ID NO: 1811 - protein, 128 aa, synthetic construct
GQKHTVTLLHVFHFRGNRVTRVEVEIFPAGEEPTREGTGSLSEEQIRQFLRRFYEALDSGDADTAASLFHPGVTIHLWDGVTFTSREEFREWFERLFSTSKDAWRRIVRLDVNGDTVTVVVELTFTLN

SEQ ID NO: 1812 - protein, 128 aa, synthetic construct
GQKHTVTLLHVFRFRGNRVTEVRVEIFPDGEEPTREGEGSLSEEQIRQFLRRFYEALDSGDADTAASLFHPGVTIHLWDGVTFTSREEFREWFERLFSTSKDAWREIVRLDVRGDTVVVVVRLEFTLN

SEQ ID NO: 1813 - protein, 128 aa, synthetic construct
GQKHTVTLLHRFVFRGNRVTEVRVEIFPDAERPTYEGEGSLSEEQIRQFLRRFYEALDSGDADTAASLFHPGVTIHLWDGVTFTSREEFREWFERLFSTSKDAWREIERLDVRGDTVTVVVRLTFTLN

SEQ ID NO: 1814 - protein, 128 aa, synthetic construct
GQKHTVTLLHTFVFRGNRVTHVEVEIYPDGELPTREGTGSLSEEQIRQFLRRFYEALDSGDADTAASLFHPGVTIHLWDGVTFTSREEFREWFERLFSTSKDAWREIVRLDVDGDTVVVVVRLTFTLN

SEQ ID NO: 1815 - protein, 128 aa, synthetic construct
GQKHTVTLLHTFVFRGNRVTEVRVRIYPEGEEPLVEGEGSLDEEQIRQFLRRFYEALDSGDADTAASLFHPGVTIHLWDGVTFTSREEFREWFERLFSTSKDAWREIVRLDVNGDTVSVVVRLTFTLN

SEQ ID NO: 1816 - protein, 128 aa, synthetic construct
GQKHTVVLHHHFVFRGNRVTEVEVEIYPDGERPTREGRGSLSEEQIRQFLRRFYEALDSGDADTAASLFHPGVTIHLWDGVTFTSREEFREWFERLFSTSKDAWRRIERLDVNGDTVDVVVTLTFTLN

SEQ ID NO: 1817 - protein, 128 aa, synthetic construct
GQKHTVTLLHRFVFRGNRVTEVEVRIYPEEGRPTVEGSGSLSEEQIRQFLRRFYEALDSGDADTAASLFHPGVTIHLWDGVTFTSREEFREWFERLFSTSKDAWREIVELRVNGDTVTVVVRLTFTLN

SEQ ID NO: 1818 - protein, 128 aa, synthetic construct
GQKHTVVLHHVFEFRGNRVTRVRVRIYPAGELPRTEGRGSLSEEQIRQFLRRFYEALDSGDADTAASLFHPGVTIHLWDGVTFTSREEFREWFERLFSTSKDAWREIVHLDVRGDTVDVVVRLTFTLN

SEQ ID NO: 1819 - protein, 128 aa, synthetic construct
GQKHTVDLLHVFEFRGNRVTRVEVEIFPAGELPRREGSGSLSEEQIRQFLRRFYEALDSGDADTAASLFHPGVTIHLWDGVTFTSREEFREWFERLFSTSKDAWREIVELDVNGDTVVVRVRLTFTLN

SEQ ID NO: 1820 - protein, 129 aa, synthetic construct
GQKHTVRLVHVFRFRGNRVTEVRVEIFPDDEGRWEEAPAGDMSEEQIRQFLRRFYEALDSGDADTAASLFHPGVTIHLWDGVTFTSREEFREWFERLFSTSKDAWRHIDELVVNGDTVVVRVTLHFTLN

SEQ ID NO: 1821 - protein, 129 aa, synthetic construct
GQKHTVLLLHRFTFRGNRVTEVEVRIFPEGEGEEEEAPAGDMSEEQIRQFLRRFYEALDSGDADTAASLFHPGVTIHLWDGVTFTSREEFREWFERLFSTSKDAWREILRLEVNGDTVTVLVRLTFTLN

SEQ ID NO: 1822 - protein, 129 aa, synthetic construct
GQKHTVRLVHEFRFRGNRVTEVRVRIFPADEGEWEAAPAGDMSEEQIRQFLRRFYEALDSGDADTAASLFHPGVTIHLWDGVTFTSREEFREWFERLFSTSKDAWREIERLVVNGDTVTVLVTLNFTLN

SEQ ID NO: 1823 - protein, 129 aa, synthetic construct
GQKHTVLLVHVFRFRGNRVTEVEVRIFPEDEGEEEEAPEGSMSEEQIRQFLRRFYEALDSGDADTAASLFHPGVTIHLWDGVTFTSREEFREWFERLFSTSKDAWREILRLEVRGDTVTVLVRLEFTLN

SEQ ID NO: 1824 - protein, 129 aa, synthetic construct
GQKHTVLLVHVFRFRGNRVTEVRVRIFPEDEGEEAEAPSGSMSEEQIRQFLRRFYEALDSGDADTAASLFHPGVTIHLWDGVTFTSREEFREWFERLFSTSKDAWREILRLEVNGDTVTVLVRLDFTLN

SEQ ID NO: 1825 - protein, 129 aa, synthetic construct
GQKHTVLLLHRFRFRGNRVTEVEVRIFPADEGEFELAPSGSMSEEQIRQFLRRFYEALDSGDADTAASLFHPGVTIHLWDGVTFTSREEFREWFERLFSTSKDAWREILRLEVNGDTVSVLVRLDFTLN

SEQ ID NO: 1826 - protein, 129 aa, synthetic construct
GQKHTVELLHLFRFRGNRVTEVRVEIFPAGEGAWAEAPSGSMSEEQIRQFLRRFYEALDSGDADTAASLFHPGVTIHLWDGVTFTSREEFREWFERLFSTSKDAWREIDRLVVNGDTVSVRVTLNFTLN

SEQ ID NO: 1827 - protein, 129 aa, synthetic construct
GQKHEVLLLHRFHFRGNRVTEVEVRIFPAGEGEFALAPAGSMSEEQIRQFLRRFYEALDSGDADTAASLFHPGVTIHLWDGVTFTSREEFREWFERLFSTSKDAWREILRLEVNGDTVSVLVRLRFTLN

SEQ ID NO: 1828 - protein, 129 aa, synthetic construct
GQKHTVRLVHEFRFRGNRVTEVRVRIFPEENGEWEAAPAGAMSEEQIRQFLRRFYEALDSGDADTAASLFHPGVTIHLWDGVTFTSREEFREWFERLFSTSKDAWRHIERLVVNGDTVTVLVTLNFTLN

SEQ ID NO: 1829 - protein, 129 aa, synthetic construct
GQKHTVLLLHRFRFRGNRVTEVEVRIFPEDEGEWEEAPSGSMSEEQIRQFLRRFYEALDSGDADTAASLFHPGVTIHLWDGVTFTSREEFREWFERLFSTSKDAWREILRLEVNGDTVSVLVRLEFTLN

SEQ ID NO: 1830 - protein, 129 aa, synthetic construct
GQKHTVELLHRFRFRGNRVTEVEVEIFPADEGRWEAAPSGDMSEEQIRQFLRRFYEALDSGDADTAASLFHPGVTIHLWDGVTFTSREEFREWFERLFSTSKDAWREITELVVNGDTVSVRVTLHFTLN

SEQ ID NO: 1831 - protein, 129 aa, synthetic construct
GQKHTVLLLHLFRFRGNRVTEVRVEIFPEDEGAWEEAPSGSMSEEQIRQFLRRFYEALDSGDADTAASLFHPGVTIHLWDGVTFTSREEFREWFERLFSTSKDAWREILELVVNGDTVSVRVRLDFTLN

SEQ ID NO: 1832 - protein, 129 aa, synthetic construct
GQKHTVLLLHRFRFRGNRVTEVEVRIFPAGEGEFAEAPSGSMSEEQIRQFLRRFYEALDSGDADTAASLFHPGVTIHLWDGVTFTSREEFREWFERLFSTSKDAWREILRLEVNGDTVSVLVRLEFTLN

SEQ ID NO: 1833 - protein, 129 aa, synthetic construct
GQKHTVRLLHEFVFRGNRVTEVRVRIFPEDEGEWAAAPAGAMSEEQIRQFLRRFYEALDSGDADTAASLFHPGVTIHLWDGVTFTSREEFREWFERLFSTSKDAWRHIERLVVNGDTVSVLVTLEFTLN

SEQ ID NO: 1834 - protein, 129 aa, synthetic construct
GQKHTVLLVHRFRFRGNRVTEVEVRIFPKEEGEEEEAPSGAMSEEQIRQFLRRFYEALDSGDADTAASLFHPGVTIHLWDGVTFTSREEFREWFERLFSTSKDAWRRILRLEVNGDTVTVLVELNFTLN

SEQ ID NO: 1835 - protein, 129 aa, synthetic construct
GQKHTVLLVHEFRFRGNRVTEVRVRIFPEGEGAEAEAPEGSMSEEQIRQFLRRFYEALDSGDADTAASLFHPGVTIHLWDGVTFTSREEFREWFERLFSTSKDAWREILRLEVRGDTVTVLVRLEFTLN

SEQ ID NO: 1836 - protein, 129 aa, synthetic construct
GQKHTVRLVHRFRFRGNRVTEVEVRIFPDGEGEAEEAPEGDMSEEQIRQFLRRFYEALDSGDADTAASLFHPGVTIHLWDGVTFTSREEFREWFERLFSTSKDAWRHIDRLVVNGDTVTVTVTLNFTLN

SEQ ID NO: 1837 - protein, 129 aa, synthetic construct
GQKHTVELVHRFRFRGNRVTEVRVEIFPADEGRFAEAPGGSMSEEQIRQFLRRFYEALDSGDADTAASLFHPGVTIHLWDGVTFTSREEFREWFERLFSTSKDAWREITELVVNGDTVTVRVTLNFTLN

SEQ ID NO: 1838 - protein, 129 aa, synthetic construct
GQKHTVLLLHEFRFRGNRVTEVRVRIFPAGEGEFGLAPSGDMSEEQIRQFLRRFYEALDSGDADTAASLFHPGVTIHLWDGVTFTSREEFREWFERLFSTSKDAWRHIERLEVRGDTVSVLVTLEFTLN

SEQ ID NO: 1839 - protein, 129 aa, synthetic construct
GQKHTVRLLHEFRFRGNRVTEVRVRIFPDDEGEWAAAPEGDMSEEQIRQFLRRFYEALDSGDADTAASLFHPGVTIHLWDGVTFTSREEFREWFERLFSTSKDAWRRIERLEVRGDTVSVLVTLEFTLN

SEQ ID NO: 1840 - protein, 130 aa, synthetic construct
GQKHHVRLTHTFVFRGNRVTSVTVRIEEVDGPLREEAEAPGEIGEEQIRQFLRRFYEALDSGDADTAASLFHPGVTIHLWDGVTFTSREEFREWFERLFSTSKDAWREITSLVVEGDTVTVEVVLTFTLN

SEQ ID NO: 1841 - protein, 130 aa, synthetic construct
GQKHTVRLTHTFHFRGNRVTRVEVRIEEVEGAPSETASAPGEIGEEQIRQFLRRFYEALDSGDADTAASLFHPGVTIHLWDGVTFTSREEFREWFERLFSTSKDAWRRIDSLVVEGDTVTVTVTLTFTLN

SEQ ID NO: 1842 - protein, 130 aa, synthetic construct
GQKHWVRLTHTFRFRGNRVTEVRVEIEEVDGPPTESASAPGAIPEEQIRQFLRRFYEALDSGDADTAASLFHPGVTIHLWDGVTFTSREEFREWFERLFSTSKDAWRRITSLVVEGDTVTVEVVLEFTLN

SEQ ID NO: 1843 - protein, 130 aa, synthetic construct
GQKHWVRLTHTFVFRGNRVTEVRVTIEEVDGRPREAASSSGAIGEEQIRQFLRRFYEALDSGDADTAASLFHPGVTIHLWDGVTFTSREEFREWFERLFSTSKDAWREITSLVVEGDTVTVTVVLEFTLN

SEQ ID NO: 1844 - protein, 130 aa, synthetic construct
GQKHTVRLTHTFVFRGNRVTEVRVEIEEVDGPPVETASGSGEIGEEQIRQFLRRFYEALDSGDADTAASLFHPGVTIHLWDGVTFTSREEFREWFERLFSTSKDAWREITSLVVEGDTVTVRVVLTFTLN

SEQ ID NO: 1845 - protein, 130 aa, synthetic construct
GQKHWVELTHTFHFRGNRVTRVEVEIREVDGRPVETASASGEIGEEQIRQFLRRFYEALDSGDADTAASLFHPGVTIHLWDGVTFTSREEFREWFERLFSTSKDAWRRITSLVVEGDTVTVRVVLEFTLN

SEQ ID NO: 1846 - protein, 130 aa, synthetic construct
GQKHTVSLTHVFEFRGNRVTSVTVTITEVDGPPRTSASAPGTIGEEQIRQFLRRFYEALDSGDADTAASLFHPGVTIHLWDGVTFTSREEFREWFERLFSTSKDAWREITSLVVEGDTVTVDVVLTFTLN

SEQ ID NO: 1847 - protein, 130 aa, synthetic construct
GQKHWVRLTHVFHFRGNRVTRVEVEIEEVDGRPRESRSAAGSIGEEQIRQFLRRFYEALDSGDADTAASLFHPGVTIHLWDGVTFTSREEFREWFERLFSTSKDAWREITSLVVEGDTVTVEVVLEFTLN

SEQ ID NO: 1848 - protein, 130 aa, synthetic construct
GQKHTVRLTHVFRFRGNRVTEVRVTIEPVDGPEEETAEAPGEIGEEQIRQFLRRFYEALDSGDADTAASLFHPGVTIHLWDGVTFTSREEFREWFERLFSTSKDAWRRITSLVVEGDTVTVTVVLTFTLN

SEQ ID NO: 1849 - protein, 130 aa, synthetic construct
GQKHWVELTHTFVFRGNRVTEVRVEIEEVPGRPREEASAPGAIGEEQIRQFLRRFYEALDSGDADTAASLFHPGVTIHLWDGVTFTSREEFREWFERLFSTSKDAWREITSLVVEGDTVTVRVVLEFTLN

SEQ ID NO: 1850 - protein, 130 aa, synthetic construct
GQKHWVRLTHRFRFRGNRVTEVEVTIEPVDGPPRRSASGPGTIGEEQIRQFLRRFYEALDSGDADTAASLFHPGVTIHLWDGVTFTSREEFREWFERLFSTSKDAWREITSLVVEGDTVTVEVVLTFTLN

SEQ ID NO: 1851 - protein, 130 aa, synthetic construct
GQKHWVRLVHRFHFRGNRVTEVEVTIEPVDGRPRESASASGSIPEEQIRQFLRRFYEALDSGDADTAASLFHPGVTIHLWDGVTFTSREEFREWFERLFSTSKDAWREIDSLVVEGDTVTVTVTLEFTLN

SEQ ID NO: 1852 - protein, 130 aa, synthetic construct
GQKHWVRLTHTFVFRGNRVTEVTVEITPVDGPPVETASAPGAIPEEQIRQFLRRFYEALDSGDADTAASLFHPGVTIHLWDGVTFTSREEFREWFERLFSTSKDAWRRITSLVVEGDTVTVTVVLEFTLN

SEQ ID NO: 1853 - protein, 130 aa, synthetic construct
GQKHWVELTHVFRFRGNRVTEVRVTITPVDGPPRESASGSGSIGEEQIRQFLRRFYEALDSGDADTAASLFHPGVTIHLWDGVTFTSREEFREWFERLFSTSKDAWREIHSLVVEGDTVTVRVTLTFTLN

SEQ ID NO: 1854 - protein, 130 aa, synthetic construct
GQKHTVRLTHTFVFRGNRVTEVRVEIEPVDGPPEETAEAPGEIPEEQIRQFLRRFYEALDSGDADTAASLFHPGVTIHLWDGVTFTSREEFREWFERLFSTSKDAWRRIDSLVVEGDTVTVTVTLTFTLN

SEQ ID NO: 1855 - protein, 130 aa, synthetic construct
GQKHWVRLTHVFEFRGNRVTSVTVTIEEVDGPPRETASAPGAIGEEQIRQFLRRFYEALDSGDADTAASLFHPGVTIHLWDGVTFTSREEFREWFERLFSTSKDAWREIDSLVVEGDTVTVTVTLEFTLN

SEQ ID NO: 1856 - protein, 130 aa, synthetic construct
GQKHWVELTHVFRFRGNRVTEVRVEITPVDGPVRETASAPGEIGEEQIRQFLRRFYEALDSGDADTAASLFHPGVTIHLWDGVTFTSREEFREWFERLFSTSKDAWREITSLVVEGDTVTVRVVLTFTLN

SEQ ID NO: 1857 - protein, 130 aa, synthetic construct
GQKHWVRLTHTFVFRGNRVTEVRVTIEPVDGPPVETASASGTIGEEQIRQFLRRFYEALDSGDADTAASLFHPGVTIHLWDGVTFTSREEFREWFERLFSTSKDAWRRIDSLVVEGDTVTVTVTLEFTLN

SEQ ID NO: 1858 - protein, 130 aa, synthetic construct
GQKHWVRLTHRFHFRGNRVTEVEVTIEPVDGRPVETASGSGTIGEEQIRQFLRRFYEALDSGDADTAASLFHPGVTIHLWDGVTFTSREEFREWFERLFSTSKDAWREITSLVVEGDTVTVTVVLEFTLN

SEQ ID NO: 1859 - protein, 130 aa, synthetic construct
GQKHTVRLTHTFEFRGNRVTRVTVTIEEVDGAPRRTASAPGAIPEEQIRQFLRRFYEALDSGDADTAASLFHPGVTIHLWDGVTFTSREEFREWFERLFSTSKDAWREITSLVVEGDTVTVEVVLTFTLN

SEQ ID NO: 1860 - protein, 131 aa, synthetic construct
GQKHVVRLTHTFRFRGNRVTEVSVEIRPVESADPGFEEGGGGPPSEEQIRQFLRRFYEALDSGDADTAASLFHPGVTIHLWDGVTFTSREEFREWFERLFSTSKDAWRRIVRLEVEGDTVTVEVVLTFTLN

SEQ ID NO: 1861 - protein, 131 aa, synthetic construct
GQKHVVRLTHVFRFRGNRVTEVSVTITPVESANPGRREGGGGPPSEEQIRQFLRRFYEALDSGDADTAASLFHPGVTIHLWDGVTFTSREEFREWFERLFSTSKDAWREITELEVDGDTVTVTVVLTFTLN

SEQ ID NO: 1862 - protein, 131 aa, synthetic construct
GQKHVVRLVHTFEFRGNRVTRVTVEIYPLDSANPGRRESGGGPPPEEQIRQFLRRFYEALDSGDADTAASLFHPGVTIHLWDGVTFTSREEFREWFERLFSTSKDAWREITRLEVDGDTVTVEVVLTFTLN

SEQ ID NO: 1863 - protein, 131 aa, synthetic construct
GQKHVVELTHTFEFRGNRVTRVTVEIHPVESANPGFREGGGGPPPEEQIRQFLRRFYEALDSGDADTAASLFHPGVTIHLWDGVTFTSREEFREWFERLFSTSKDAWRRITELRVDGDTVTVRVVLTFTLN

SEQ ID NO: 1864 - protein, 131 aa, synthetic construct
GQKHIVRLTHTFRFRGNRVTEVSVRIEPVESANPGYEEGGGGPPSEEQIRQFLRRFYEALDSGDADTAASLFHPGVTIHLWDGVTFTSREEFREWFERLFSTSKDAWRRITRLRVDGDTVTVEVVLTFTLN

SEQ ID NO: 1865 - protein, 131 aa, synthetic construct
GQKHVVRLTHVFRFRGNRVTEVTVTITPVESANPGVREGGGGPPPEEQIRQFLRRFYEALDSGDADTAASLFHPGVTIHLWDGVTFTSREEFREWFERLFSTSKDAWRRITRLEVDGDTVTVEVVLTFTLN

SEQ ID NO: 1866 - protein, 131 aa, synthetic construct
GQKHIVRLTHVFRFRGNRVTEVSVTIEPVESANPGFEEGGGGPPSEEQIRQFLRRFYEALDSGDADTAASLFHPGVTIHLWDGVTFTSREEFREWFERLFSTSKDAWRRITRLEVDGDTVTVEVVLEFTLN

SEQ ID NO: 1867 - protein, 131 aa, synthetic construct
GQKHVVRLTHTFRFRGNRVTEVSVRIEPLESADPGFEEGGGGPPPEEQIRQFLRRFYEALDSGDADTAASLFHPGVTIHLWDGVTFTSREEFREWFERLFSTSKDAWRRITRLRVDGDTVTVEVVLTFTLN

SEQ ID NO: 1868 - protein, 131 aa, synthetic construct
GQKHVVRLRHTFRFRGNRVTEVTVEITPVESADPEREEGGGGPPSEEQIRQFLRRFYEALDSGDADTAASLFHPGVTIHLWDGVTFTSREEFREWFERLFSTSKDAWREITRLRVEGDTVEVEVVLTFTLN

SEQ ID NO: 1869 - protein, 131 aa, synthetic construct
GQKHVVRLTHTFEFRGNRVTRVTVEITPVESADPGFEEGGGGPPSEEQIRQFLRRFYEALDSGDADTAASLFHPGVTIHLWDGVTFTSREEFREWFERLFSTSKDAWRRITRLRVEGDTVTVEVVLEFTLN

SEQ ID NO: 1870 - protein, 131 aa, synthetic construct
GQKHVVRLTHTFEFRGNRVTRVSVRIEPLDSANPGFEEGGGGPPPEEQIRQFLRRFYEALDSGDADTAASLFHPGVTIHLWDGVTFTSREEFREWFERLFSTSKDAWRRITRLRVDGDTVTVEVVLEFTLN

SEQ ID NO: 1871 - protein, 131 aa, synthetic construct
GQKHVVRLTHTFRFRGNRVTEVRVEITPLESYNPGVEFGGGGPPSEEQIRQFLRRFYEALDSGDADTAASLFHPGVTIHLWDGVTFTSREEFREWFERLFSTSKDAWREITRLRVEGDTVTVEVVLTFTLN

SEQ ID NO: 1872 - protein, 131 aa, synthetic construct
GQKHVVRLRHTFEFRGNRVTRVTVEIFPLESANPEFHEEGGGPPPEEQIRQFLRRFYEALDSGDADTAASLFHPGVTIHLWDGVTFTSREEFREWFERLFSTSKDAWREIVRLRVEGDTVTVEVVLTFTLN

SEQ ID NO: 1873 - protein, 131 aa, synthetic construct
GQKHVVRLTHTFRFRGNRVTEVSVEIEPVESANPGRREGGGGPPPEEQIRQFLRRFYEALDSGDADTAASLFHPGVTIHLWDGVTFTSREEFREWFERLFSTSKDAWREITELRVDGDTVTVEVVLTFTLN

SEQ ID NO: 1874 - protein, 131 aa, synthetic construct
GQKHVVRLTHTFRFRGNRVTEVSVEIRPVESANPGRREGGGGPPSEEQIRQFLRRFYEALDSGDADTAASLFHPGVTIHLWDGVTFTSREEFREWFERLFSTSKDAWREITRLEVDGDTVTVEVVLTFTLN

SEQ ID NO: 1875 - protein, 131 aa, synthetic construct
GQKHVVRLTHTFRFRGNRVTEVSVEIHPVESWNPEREEGGGGPPPEEQIRQFLRRFYEALDSGDADTAASLFHPGVTIHLWDGVTFTSREEFREWFERLFSTSKDAWREIVRLRVDGDTVTVEVVLTFTLN

SEQ ID NO: 1876 - protein, 131 aa, synthetic construct
GQKHVVRLTHTFRFRGNRVTEVSVRIEPVESANPGREEGGGGPPPEEQIRQFLRRFYEALDSGDADTAASLFHPGVTIHLWDGVTFTSREEFREWFERLFSTSKDAWREITRLRVDGDTVTVEVVLTFTLN

SEQ ID NO: 1877 - protein, 131 aa, synthetic construct
GQKHVVRLTHTFRFRGNRVTEVSVTITPVESANPGREEGGGGPPSEEQIRQFLRRFYEALDSGDADTAASLFHPGVTIHLWDGVTFTSREEFREWFERLFSTSKDAWREITRLRVDGDTVTVEVVLTFTLN

SEQ ID NO: 1878 - protein, 131 aa, synthetic construct
GQKHVVRLTHVFRFRGNRVTEVSVTITPLESADPGRREEGGGPPPEEQIRQFLRRFYEALDSGDADTAASLFHPGVTIHLWDGVTFTSREEFREWFERLFSTSKDAWREITELRVEGDTVTVEVVLTFTLN

SEQ ID NO: 1879 - protein, 131 aa, synthetic construct
GQKHVVRLTHTFQFRGNRVTEVTVEIEPLESANPGFREGGGGPPSEEQIRQFLRRFYEALDSGDADTAASLFHPGVTIHLWDGVTFTSREEFREWFERLFSTSKDAWREITRLEVDGDTVTVEVVLTFTLN

SEQ ID NO: 1880 - protein, 132 aa, synthetic construct
GQKHVVRLTHTFEFRGNRVTRVTVEITPVESFEWEETERLGPSAIPEEQIRQFLRRFYEALDSGDADTAASLFHPGVTIHLWDGVTFTSREEFREWFERLFSTSKDAWRRITRLEVRGDTVTVEVVLEFTLN

SEQ ID NO: 1881 - protein, 132 aa, synthetic construct
GQKHVVRLRHTFEFRGNRVTRVTVEITPVESFEWERTEELGPSAIPEEQIRQFLRRFYEALDSGDADTAASLFHPGVTIHLWDGVTFTSREEFREWFERLFSTSKDAWREITRLVVDGDTVTVEVVLTFTLN

SEQ ID NO: 1882 - protein, 132 aa, synthetic construct
GQKHVVRLRHTFRFRGNRVTEVEVEITPVESFEYEPTERLGPSAIPEEQIRQFLRRFYEALDSGDADTAASLFHPGVTIHLWDGVTFTSREEFREWFERLFSTSKDAWRRITALEVDGDTVTVEVVLEFTLN

SEQ ID NO: 1883 - protein, 132 aa, synthetic construct
GQKHVVRLTHTFHFRGNRVTHVEVRITPVESFEYEPTERLGPSAIPEEQIRQFLRRFYEALDSGDADTAASLFHPGVTIHLWDGVTFTSREEFREWFERLFSTSKDAWRRITSLEVDGDTVTVEVVLEFTLN

SEQ ID NO: 1884 - protein, 132 aa, synthetic construct
GQKHVVRLRHTFEFRGNRVTRVTVEIEPLESFEWERTERLGPSAIPEEQIRQFLRRFYEALDSGDADTAASLFHPGVTIHLWDGVTFTSREEFREWFERLFSTSKDAWREITRLEVDGDTVTVEVILTFTLN

SEQ ID NO: 1885 - protein, 132 aa, synthetic construct
GQKHVVRLTHTFEFRGNRVTRVRVEIEPVESFEWERTERLGPSAIPEEQIRQFLRRFYEALDSGDADTAASLFHPGVTIHLWDGVTFTSREEFREWFERLFSTSKDAWREITRLEVEGDTVTVEVVLTFTLN

SEQ ID NO: 1886 - protein, 132 aa, synthetic construct
GQKHVVRLTHTFRFRGNRVTEVRVEIEPLESFEWERTEELGPSAIPEEQIRQFLRRFYEALDSGDADTAASLFHPGVTIHLWDGVTFTSREEFREWFERLFSTSKDAWREIVRLRVEGDTVTVEVILTFTLN

SEQ ID NO: 1887 - protein, 132 aa, synthetic construct
GQKHVVRLVHTFEFRGNRVTRVTVEIFPVESYEYEPTEELGPSAIPEEQIRQFLRRFYEALDSGDADTAASLFHPGVTIHLWDGVTFTSREEFREWFERLFSTSKDAWRRITRLRVEGDTVTVEVILEFTLN

SEQ ID NO: 1888 - protein, 132 aa, synthetic construct
GQKHVVRLTHTFEFRGNRVTRVTVEIEPVESYEYEEEERLGPSAIPEEQIRQFLRRFYEALDSGDADTAASLFHPGVTIHLWDGVTFTSREEFREWFERLFSTSKDAWRRIVRLEVEGDTVTVEVVLEFTLN

SEQ ID NO: 1889 - protein, 132 aa, synthetic construct
GQKHVVRLTHTFRFRGNRVTEVRVEITPLESYEYEPTERLGPSAIPEEQIRQFLRRFYEALDSGDADTAASLFHPGVTIHLWDGVTFTSREEFREWFERLFSTSKDAWREITRLEVDGDTVTVEVVLTFTLN

SEQ ID NO: 1890 - protein, 132 aa, synthetic construct
GQKHVVRLTHTFEFRGNRVTSVTVTITPVDSFEYEETERLGPSAIPEEQIRQFLRRFYEALDSGDADTAASLFHPGVTIHLWDGVTFTSREEFREWFERLFSTSKDAWRRIVALEVDGDTVTVEVILEFTLN

SEQ ID NO: 1891 - protein, 132 aa, synthetic construct
GQKHVVRLTHTFRFRGNRVTEVTVEIEPLESYEYEPTEELGPSAIPEEQIRQFLRRFYEALDSGDADTAASLFHPGVTIHLWDGVTFTSREEFREWFERLFSTSKDAWREIVALRVEGDTVTVEVVLTFTLN

SEQ ID NO: 1892 - protein, 132 aa, synthetic construct
GQKHVVRLTHTFEFRGNRVTRVTVEITPVESFESEPTEELGPSAIPEEQIRQFLRRFYEALDSGDADTAASLFHPGVTIHLWDGVTFTSREEFREWFERLFSTSKDAWREITRLRVEGDTVTVEVVLTFTLN

SEQ ID NO: 1893 - protein, 132 aa, synthetic construct
GQKHVVRLTHTFRFRGNRVTEVRVEIEPVESYEYERTERLGPSAIPEEQIRQFLRRFYEALDSGDADTAASLFHPGVTIHLWDGVTFTSREEFREWFERLFSTSKDAWREIVRLEVDGDTVTVEVVLEFTLN

SEQ ID NO: 1894 - protein, 132 aa, synthetic construct
GQKHVVRLTHTFEFRGNRVTRVTVEIEPVDSFEWERTERLGPSAIPEEQIRQFLRRFYEALDSGDADTAASLFHPGVTIHLWDGVTFTSREEFREWFERLFSTSKDAWREIVSLEVDGDTVTVEVILTFTLN

SEQ ID NO: 1895 - protein, 132 aa, synthetic construct
GQKHVVRLTHTFRFRGNRVTEVTVEIEPVESFEFEEEERLGPSAIPEEQIRQFLRRFYEALDSGDADTAASLFHPGVTIHLWDGVTFTSREEFREWFERLFSTSKDAWRRIVRLEVEGDTVTVEVVLEFTLN

SEQ ID NO: 1896 - protein, 132 aa, synthetic construct
GQKHVVRLTHTFEFRGNRVTRVTVEIEPVESYEYEPTEELGPSAIPEEQIRQFLRRFYEALDSGDADTAASLFHPGVTIHLWDGVTFTSREEFREWFERLFSTSKDAWRRITELRVDGDTVTVEVVLEFTLN

SEQ ID NO: 1897 - protein, 132 aa, synthetic construct
GQKHVVRLRHTFRFRGNRVTEVTVEIEPVESFEYEPTERLGPSAIPEEQIRQFLRRFYEALDSGDADTAASLFHPGVTIHLWDGVTFTSREEFREWFERLFSTSKDAWREIVRLEVDGDTVTVEVILTFTLN

SEQ ID NO: 1898 - protein, 132 aa, synthetic construct
GQKHVVKLTHTFEFRGNRVTAVRVEITPVESFEYERTEELGPSAIPEEQIRQFLRRFYEALDSGDADTAASLFHPGVTIHLWDGVTFTSREEFREWFERLFSTSKDAWREIVSLRVDGDTVTVEVILTFTLN

SEQ ID NO: 1899 - protein, 132 aa, synthetic construct
GQKHVVRLTHTFEFRGNRVTRVTVEITPVESFEYEETEELGPSAIPEEQIRQFLRRFYEALDSGDADTAASLFHPGVTIHLWDGVTFTSREEFREWFERLFSTSKDAWRRITHLRVEGDTVTVEVVLEFTLN

SEQ ID NO: 1900 - protein, 133 aa, synthetic construct
GQKHYVRLTHTFVFRGNRVTEVRVEITPLDKPTPLPFTEHFEPSAIPEEQIRQFLRRFYEALDSGDADTAASLFHPGVTIHLWDGVTFTSREEFREWFERLFSTSKDAWREIYRLEVRGDTVVVEVVLEFTLN

SEQ ID NO: 1901 - protein, 133 aa, synthetic construct
GQKHYVRLVHRFRFRGNRVTEVEVEIFPLDAPDPQPFEEHFAPSAIPEEQIRQFLRRFYEALDSGDADTAASLFHPGVTIHLWDGVTFTSREEFREWFERLFSTSKDAWRRIYRLEVDGDTVTVEVVLEFTLN

SEQ ID NO: 1902 - protein, 133 aa, synthetic construct
GQKHYVRLTHTFVFRGNRVTEVRVEITPLDKPDPQPRTERFGPSAIPEEQIRQFLRRFYEALDSGDADTAASLFHPGVTIHLWDGVTFTSREEFREWFERLFSTSKDAWREIYSLEVDGDTVTVEVVLEFTLN

SEQ ID NO: 1903 - protein, 133 aa, synthetic construct
GQKHYVRLTHTFRFRGNRVTEVRVEIRPLDHPDPRPFTERFAPSAIPEEQIRQFLRRFYEALDSGDADTAASLFHPGVTIHLWDGVTFTSREEFREWFERLFSTSKDAWRYIYRLEVDGDTVTVEVVLEFTLN

SEQ ID NO: 1904 - protein, 133 aa, synthetic construct
GQKHYVRLTHTFRFRGNRVTEVRVEIEPLDEEDPRPFTEHFEPSAIPEEQIRQFLRRFYEALDSGDADTAASLFHPGVTIHLWDGVTFTSREEFREWFERLFSTSKDAWRRIYRLEVRGDTVTVEVVLEFTLN

SEQ ID NO: 1905 - protein, 133 aa, synthetic construct
GQKHYVRLTHTFRFRGNRVTEVRVEITPLDAPSPEPFEEEFGPSAIPEEQIRQFLRRFYEALDSGDADTAASLFHPGVTIHLWDGVTFTSREEFREWFERLFSTSKDAWRYIVRLRVDGDTVVVEVVLEFTLN

SEQ ID NO: 1906 - protein, 133 aa, synthetic construct
GQKHYVRLTHTFRFRGNRVTEVRVEIEPLDAPDPRPFREEFGPSAIPEEQIRQFLRRFYEALDSGDADTAASLFHPGVTIHLWDGVTFTSREEFREWFERLFSTSKDAWRYIYELRVEGDTVTVEVVLEFTLN

SEQ ID NO: 1907 - protein, 133 aa, synthetic construct
GQKHYVRLTHVFEFRGNRVTAVRVTITPVDAPTPLPFSERFGPSAIPEEQIRQFLRRFYEALDSGDADTAASLFHPGVTIHLWDGVTFTSREEFREWFERLFSTSKDAWREIYRLEVDGDTVTVEVVLEFTLN

SEQ ID NO: 1908 - protein, 133 aa, synthetic construct
GQKHYVRLTHRFRFRGNRVTEVEVEITPLDHEDPRPFRERFAPSAIPEEQIRQFLRRFYEALDSGDADTAASLFHPGVTIHLWDGVTFTSREEFREWFERLFSTSKDAWREIYELVVEGDTVTVDVVLSFTLN

SEQ ID NO: 1909 - protein, 133 aa, synthetic construct
GQKHYVRLRHTFRFRGNRVTEVRVEIFPLDAPTPEPFTERFGPSAIPEEQIRQFLRRFYEALDSGDADTAASLFHPGVTIHLWDGVTFTSREEFREWFERLFSTSKDAWRRIVTLEVDGDTVTVDVVLEFTLN

SEQ ID NO: 1910 - protein, 133 aa, synthetic construct
GQKHYVRLRHRFVFRGNRVTEVEVEIYPLDKEDPQPRRERFAPSAIPEEQIRQFLRRFYEALDSGDADTAASLFHPGVTIHLWDGVTFTSREEFREWFERLFSTSKDAWREITTLEVDGDTVTVEVVLSFTLN

SEQ ID NO: 1911 - protein, 133 aa, synthetic construct
GQKHYVRLTHTFVFRGNRVTEVRVEIRPLDAPDPRPFTEEFGPSAIPEEQIRQFLRRFYEALDSGDADTAASLFHPGVTIHLWDGVTFTSREEFREWFERLFSTSKDAWRYIYRLVVDGDTVTVEVVLEFTLN

SEQ ID NO: 1912 - protein, 133 aa, synthetic construct
GQKHYVRLTHTFEFRGNRVTSVRVEIEPLDRESPEPFEEEFGPSAIPEEQIRQFLRRFYEALDSGDADTAASLFHPGVTIHLWDGVTFTSREEFREWFERLFSTSKDAWRYIYRLVVDGDTVTVEVVLSFTLN

SEQ ID NO: 1913 - protein, 133 aa, synthetic construct
GQKHYVRLTHTFVFRGNRVTEVRVRIEPLDAEDPQPFTERFAPSAIPEEQIRQFLRRFYEALDSGDADTAASLFHPGVTIHLWDGVTFTSREEFREWFERLFSTSKDAWRYIYSLEVDGDTVTVDVVLSFTLN

SEQ ID NO: 1914 - protein, 133 aa, synthetic construct
GQKHYVRLTHTFVFRGNRVTEVRVEIEPVDAPTPLPRTERFEPSAIPEEQIRQFLRRFYEALDSGDADTAASLFHPGVTIHLWDGVTFTSREEFREWFERLFSTSKDAWREIYRLEVRGDTVTVEVVLEFTLN

SEQ ID NO: 1915 - protein, 133 aa, synthetic construct
GQKHYVELTHTFVFRGNRVTEVRVEIHPLDKPNPQPFTERFEPSAIPEEQIRQFLRRFYEALDSGDADTAASLFHPGVTIHLWDGVTFTSREEFREWFERLFSTSKDAWRYIYSLEVRGDTVTVRVVLEFTLN

SEQ ID NO: 1916 - protein, 133 aa, synthetic construct
GQKHYVRLTHEFRFRGNRVTEVRVTIEPLDAPDPRPRREEFGPSAIPEEQIRQFLRRFYEALDSGDADTAASLFHPGVTIHLWDGVTFTSREEFREWFERLFSTSKDAWREIYELRVDGDTVTVEVVLEFTLN

SEQ ID NO: 1917 - protein, 133 aa, synthetic construct
GQKHYVLLTHTFEFRGNRVTEVRVEIRPLDAEQPLPRTERFGPSAIPEEQIRQFLRRFYEALDSGDADTAASLFHPGVTIHLWDGVTFTSREEFREWFERLFSTSKDAWREIYRLEVDGDTVTVEVVLSFTLN

SEQ ID NO: 1918 - protein, 133 aa, synthetic construct
GQKHYVRLTHTFVFRGNRVTEVRVEITPLDAPTPRPFTEEFAPSAIPEEQIRQFLRRFYEALDSGDADTAASLFHPGVTIHLWDGVTFTSREEFREWFERLFSTSKDAWRYIYRLVVDGDTVTVEVVLEFTLN

SEQ ID NO: 1919 - protein, 133 aa, synthetic construct
GQKHYVRLTHTFVFRGNRVTEVEVRIEPLDAEDPRPFTERFAPSAIPEEQIRQFLRRFYEALDSGDADTAASLFHPGVTIHLWDGVTFTSREEFREWFERLFSTSKDAWREIYSLEVDGDTVTVEVVLSFTLN

SEQ ID NO: 1920 - protein, 134 aa, synthetic construct
GQKHVVRLTHTFEFRGNRVTRVEVRIEELPEDDVELPEEEEFGPSAIPEEQIRQFLRRFYEALDSGDADTAASLFHPGVTIHLWDGVTFTSREEFREWFERLFSTSKDAWRRITRLRVDGDTVTVEVVLYFTLN

SEQ ID NO: 1921 - protein, 134 aa, synthetic construct
GQKHVVRLTHTFRFRGNRVTEVRVEIEELPGEDVELPEAERFGPSAIPEEQIRQFLRRFYEALDSGDADTAASLFHPGVTIHLWDGVTFTSREEFREWFERLFSTSKDAWRRITHLEVDGDTVTVRVVLYFTLN

SEQ ID NO: 1922 - protein, 134 aa, synthetic construct
GQKHVVRLTHRFTFRGNRVTAVEVTIEELPGEDVELPRTERFGPSAIPEEQIRQFLRRFYEALDSGDADTAASLFHPGVTIHLWDGVTFTSREEFREWFERLFSTSKDAWREITRLEVDGDTVTVEVVLHFTLN

SEQ ID NO: 1923 - protein, 134 aa, synthetic construct
GQKHVVELTHVFEFRGNRVTEVRVEIRELPEDDVELPREERFGPSAIPEEQIRQFLRRFYEALDSGDADTAASLFHPGVTIHLWDGVTFTSREEFREWFERLFSTSKDAWREIYRLEVRGDTVTVEVRLYFTLN

SEQ ID NO: 1924 - protein, 134 aa, synthetic construct
GQKHVVRLTHRFVFRGNRVTEVEVRIEELPEDDVELPREERFGPSAIPEEQIRQFLRRFYEALDSGDADTAASLFHPGVTIHLWDGVTFTSREEFREWFERLFSTSKDAWREIYRLVVDGDTVTVEVVLYFTLN

SEQ ID NO: 1925 - protein, 134 aa, synthetic construct
GQKHVVTLTHTFRFRGNRVTEVRVEIKELPEENLELPREERFGPSAIPEEQIRQFLRRFYEALDSGDADTAASLFHPGVTIHLWDGVTFTSREEFREWFERLFSTSKDAWREITRLEVDGDTVTVEVVLYFTLN

SEQ ID NO: 1926 - protein, 134 aa, synthetic construct
GQKHVVRLRHTFVFRGNRVTEVRVEIEELPEEDVELPREERFGPSAIPEEQIRQFLRRFYEALDSGDADTAASLFHPGVTIHLWDGVTFTSREEFREWFERLFSTSKDAWREIYRLEVDGDTVVVEVVLTFTLN

SEQ ID NO: 1927 - protein, 134 aa, synthetic construct
GQKHVVLLTHTFRFRGNRVTEVRVEIREHPSDDLELPRSERLGPSAIPEEQIRQFLRRFYEALDSGDADTAASLFHPGVTIHLWDGVTFTSREEFREWFERLFSTSKDAWREIYRLEVDGDTVTVEVRLTFTLN

SEQ ID NO: 1928 - protein, 134 aa, synthetic construct
GQKHVVRLTHRFEFRGNRVTRVEVTIEPLPGDDVELPREERLGPSAIPEEQIRQFLRRFYEALDSGDADTAASLFHPGVTIHLWDGVTFTSREEFREWFERLFSTSKDAWREITRLEVDGDTVTVEVRLTFTLN

SEQ ID NO: 1929 - protein, 134 aa, synthetic construct
GQKHVVRLTHTFRFRGNRVTEVRVEIEPLPETDVELPRTERLGPSAIPEEQIRQFLRRFYEALDSGDADTAASLFHPGVTIHLWDGVTFTSREEFREWFERLFSTSKDAWRYITELEVDGDTVTVRVVLYFTLN

SEQ ID NO: 1930 - protein, 134 aa, synthetic construct
GQKHVVRLTHTFEFRGNRVTEVRVEIEELPEEDVELPFEEEFGPSTIPEEQIRQFLRRFYEALDSGDADTAASLFHPGVTIHLWDGVTFTSREEFREWFERLFSTSKDAWREITRLVVDGDTVTVEVVLYFTLN

SEQ ID NO: 1931 - protein, 134 aa, synthetic construct
GQKHVVELVHTFRFRGNRVTEVRVEIREVPGTDVRRERREEFGPSAIPEEQIRQFLRRFYEALDSGDADTAASLFHPGVTIHLWDGVTFTSREEFREWFERLFSTSKDAWREITELRVDGDTVTVRVVLTFTLN

SEQ ID NO: 1932 - protein, 134 aa, synthetic construct
GQKHVVTLTHRFTFRGNRVTSVEVTIEELPEDDYELPRTERFGPSAIPEEQIRQFLRRFYEALDSGDADTAASLFHPGVTIHLWDGVTFTSREEFREWFERLFSTSKDAWRYITRLEVDGDTVTVEVVLYFTLN

SEQ ID NO: 1933 - protein, 134 aa, synthetic construct
GQKHVVELTHRFEFRGNRVTRVEVTITELPTDDHELPFTEEFGPSAIPEEQIRQFLRRFYEALDSGDADTAASLFHPGVTIHLWDGVTFTSREEFREWFERLFSTSKDAWRRIYALRVDGDTVEVRVVLYFTLN

SEQ ID NO: 1934 - protein, 134 aa, synthetic construct
GQKHVVTLTHTFRFRGNRVTEVRVEIRELPEDDVELPFEERLGPSAIPEEQIRQFLRRFYEALDSGDADTAASLFHPGVTIHLWDGVTFTSREEFREWFERLFSTSKDAWRRITRLEVRGDTVTVEVLLTFTLN

SEQ ID NO: 1935 - protein, 134 aa, synthetic construct
GQKHVVTLTHEFRFRGNRVTEVRVTIEELPEDNVELPETEELGPSAIPEEQIRQFLRRFYEALDSGDADTAASLFHPGVTIHLWDGVTFTSREEFREWFERLFSTSKDAWRRITELRVDGDTVTVRVVLYFTLN

SEQ ID NO: 1936 - protein, 134 aa, synthetic construct
GQKHVVLLTHRFTFRGNRVTEVEVTITEHPSDHLELPFEEELGPSAIPEEQIRQFLRRFYEALDSGDADTAASLFHPGVTIHLWDGVTFTSREEFREWFERLFSTSKDAWRRIYRLVVDGDTVTVEVVLYFTLN

SEQ ID NO: 1937 - protein, 134 aa, synthetic construct
GQKHVVRLTHTFVFRGNRVTEVEVTIEELPSEDVELPFEEELGPSAIPEEQIRQFLRRFYEALDSGDADTAASLFHPGVTIHLWDGVTFTSREEFREWFERLFSTSKDAWRRITRLVVEGDTVTVEVVLYFTLN

SEQ ID NO: 1938 - protein, 134 aa, synthetic construct
GQKHVVTLTHEFVFRGNRVTEVRVTIEELPEEDVELPFEERFGPSAIPEEQIRQFLRRFYEALDSGDADTAASLFHPGVTIHLWDGVTFTSREEFREWFERLFSTSKDAWRRITRLEVRGDTVTVEVVLYFTLN

SEQ ID NO: 1939 - protein, 134 aa, synthetic construct
GQKHVVTLTHTFVFRGNRVTEVRVEIEELPGENVELPRTERLGPSAIPEEQIRQFLRRFYEALDSGDADTAASLFHPGVTIHLWDGVTFTSREEFREWFERLFSTSKDAWRYITELVVDGDTVTVRVVLYFTLN

SEQ ID NO: 1940 - protein, 135 aa, synthetic construct
GQKHVVRLTHTFEFRGNRVTRVRVEIEELPEDEYDPSGRSERFGPSAIPEEQIRQFLRRFYEALDSGDADTAASLFHPGVTIHLWDGVTFTSREEFREWFERLFSTSKDAWREIVSLEVDGDTVTVRVVLYFTLN

SEQ ID NO: 1941 - protein, 135 aa, synthetic construct
GQKHVVRLRHTFRFRGNRVTEVRVEIEVLPEEEYDPSGKSERFGPSEIPEEQIRQFLRRFYEALDSGDADTAASLFHPGVTIHLWDGVTFTSREEFREWFERLFSTSKDAWREIVSLEVDGDTVTVDVVLYFTLN

SEQ ID NO: 1942 - protein, 135 aa, synthetic construct
GQKHVVRLTHTFTFRGNRVTHVEVTIEELPGETYDPSGRSERFGPSEIPEEQIRQFLRRFYEALDSGDADTAASLFHPGVTIHLWDGVTFTSREEFREWFERLFSTSKDAWREIVRLTVDGDTVTVEVVLTFTLN

SEQ ID NO: 1943 - protein, 135 aa, synthetic construct
GQKHVVRLTHRFRFRGNRVTEVEVEIEELPGDEYDPSGRREEFGPSAIPEEQIRQFLRRFYEALDSGDADTAASLFHPGVTIHLWDGVTFTSREEFREWFERLFSTSKDAWREIVRLVVEGDTVTVEVVLTFTLN

SEQ ID NO: 1944 - protein, 135 aa, synthetic construct
GQKHVVRLTHTFEFRGNRVTSVTVEIEELPGDTYDPSGRSERFGPSAISEEQIRQFLRRFYEALDSGDADTAASLFHPGVTIHLWDGVTFTSREEFREWFERLFSTSKDAWREIVSLTVDGDTVTVDVVLTFTLN

SEQ ID NO: 1945 - protein, 135 aa, synthetic construct
GQKHVVKLTHTFEFRGNRVTRVTVEIEPLPSEDYDPSGRSERFGPSAISEEQIRQFLRRFYEALDSGDADTAASLFHPGVTIHLWDGVTFTSREEFREWFERLFSTSKDAWREIVSLEVDGDTVTVDVVLYFTLN

SEQ ID NO: 1946 - protein, 135 aa, synthetic construct
GQKHVVKLTHRFRFRGNRVTEVEVEIEELPSEEYDPSDVSEEFGPSAIPEEQIRQFLRRFYEALDSGDADTAASLFHPGVTIHLWDGVTFTSREEFREWFERLFSTSKDAWRRIVRLRVEGDTVTVEVVLYFTLN

SEQ ID NO: 1947 - protein, 135 aa, synthetic construct
GQKHVVRLTHTFRFRGNRVTEVRVEIEELPGDSYDPTGREEEFGPSAIPEEQIRQFLRRFYEALDSGDADTAASLFHPGVTIHLWDGVTFTSREEFREWFERLFSTSKDAWREIVRLRVEGDTVTVEVVLTFTLN

SEQ ID NO: 1948 - protein, 135 aa, synthetic construct
GQKHVVRLTHRFTFRGNRVTEVEVEIEELPGDEYDPSGRSERFGPSSIPEEQIRQFLRRFYEALDSGDADTAASLFHPGVTIHLWDGVTFTSREEFREWFERLFSTSKDAWREIVSLEVDGDTVTVEVVLTFTLN

SEQ ID NO: 1949 - protein, 135 aa, synthetic construct
GQKHVVRLTHTFEFRGNRVTRVEVEIEELPGEEYDPSGRSERFGPSAIPEEQIRQFLRRFYEALDSGDADTAASLFHPGVTIHLWDGVTFTSREEFREWFERLFSTSKDAWREIVSLTVDGDTVTVDVVLTFTLN

SEQ ID NO: 1950 - protein, 135 aa, synthetic construct
GQKHVVRLTHRFTFRGNRVTEVEVEIEELPGEEYDPSGRSERFGPSSIPEEQIRQFLRRFYEALDSGDADTAASLFHPGVTIHLWDGVTFTSREEFREWFERLFSTSKDAWREIVRLEVDGDTVTVEVVLYFTLN

SEQ ID NO: 1951 - protein, 135 aa, synthetic construct
GQKHVVRLRHTFVFRGNRVTEVRVEIEPLPGDTYDPSGRSERFGPSAIPEEQIRQFLRRFYEALDSGDADTAASLFHPGVTIHLWDGVTFTSREEFREWFERLFSTSKDAWREIVRLTVDGDTVEVEVVLTFTLN

SEQ ID NO: 1952 - protein, 135 aa, synthetic construct
GQKHVVRLTHRFVFRGNRVTEVEVRIEELPGDTYDPSGRSERFGPSAIPEEQIRQFLRRFYEALDSGDADTAASLFHPGVTIHLWDGVTFTSREEFREWFERLFSTSKDAWREIVRLEVDGDTVTVEVVLTFTLN

SEQ ID NO: 1953 - protein, 135 aa, synthetic construct
GQKHVVRLRHTFRFRGNRVTEVRVEITELPGTDFDPTGRSERFGPSAIPEEQIRQFLRRFYEALDSGDADTAASLFHPGVTIHLWDGVTFTSREEFREWFERLFSTSKDAWREIVRLEVDGDTVVVEVVLTFTLN

SEQ ID NO: 1954 - protein, 135 aa, synthetic construct
GQKHVVRLRHTFRFRGNRVTEVRVEIEELPGEEYDPTGRSEEFGPSTIPEEQIRQFLRRFYEALDSGDADTAASLFHPGVTIHLWDGVTFTSREEFREWFERLFSTSKDAWREIVRLTVRGDTVEVEVVLTFTLN

SEQ ID NO: 1955 - protein, 135 aa, synthetic construct
GQKHVVRLTHTFEFRGNRVTRVEVRIEPLPGDTYDPEGREERFGPSAIPEEQIRQFLRRFYEALDSGDADTAASLFHPGVTIHLWDGVTFTSREEFREWFERLFSTSKDAWREIVRLVVEGDTVTVEVVLTFTLN

SEQ ID NO: 1956 - protein, 135 aa, synthetic construct
GQKHVVRLTHTFTFRGNRVTEVEVEIEELPEEEYDPEGRSERFGPSAIPEEQIRQFLRRFYEALDSGDADTAASLFHPGVTIHLWDGVTFTSREEFREWFERLFSTSKDAWREIVRLEVEGDTVTVEVVLTFTLN

SEQ ID NO: 1957 - protein, 135 aa, synthetic construct
GQKHVVKLTHTFVFRGNRVTEVEVEIEPLPGEEYDPSGRSERFGPSAIPEEQIRQFLRRFYEALDSGDADTAASLFHPGVTIHLWDGVTFTSREEFREWFERLFSTSKDAWREIVRLEVDGDTVTVEVVLTFTLN

SEQ ID NO: 1958 - protein, 135 aa, synthetic construct
GQKHVVRLTHRFEFRGNRVTRVEVEIEELPGDTYDPTGRSERFGPSTIPEEQIRQFLRRFYEALDSGDADTAASLFHPGVTIHLWDGVTFTSREEFREWFERLFSTSKDAWREIVRLEVDGDTVTVEVVLTFTLN

SEQ ID NO: 1959 - protein, 135 aa, synthetic construct
GQKHVVRLRHVFRFRGNRVTEVEVTIEELPGEEYDPTGRAERFGPSTIPEEQIRQFLRRFYEALDSGDADTAASLFHPGVTIHLWDGVTFTSREEFREWFERLFSTSKDAWREIVRLEVDGDTVTVDVVLTFTLN

SEQ ID NO: 1960 - protein, 136 aa, synthetic construct
GQKHVVRLTHTFEFRGNRVTEVRVEIEEVPGDELPIDLSLVEELGPSAIPEEQIRQFLRRFYEALDSGDADTAASLFHPGVTIHLWDGVTFTSREEFREWFERLFSTSKDAWRRIVRLVVDGDTVTVEVVLSFTLN

SEQ ID NO: 1961 - protein, 136 aa, synthetic construct
GQKHVVRLRHTFEFRGNRVTRVEVEIEELPTDEAPVSLETEERLEPSAIPEEQIRQFLRRFYEALDSGDADTAASLFHPGVTIHLWDGVTFTSREEFREWFERLFSTSKDAWREITRLEVRGDTVTVEVVLHFTLN

SEQ ID NO: 1962 - protein, 136 aa, synthetic construct
GQKHCVRLTHRFRFRGNRVTEVEVEIEELPGDECPIDLSLREELGPSAIPEEQIRQFLRRFYEALDSGDADTAASLFHPGVTIHLWDGVTFTSREEFREWFERLFSTSKDAWRRITRLEVRGDTVTVEVVLHFTLN

SEQ ID NO: 1963 - protein, 136 aa, synthetic construct
GQKHAVRLRHTFRFRGNRVTEVRVEIEELPGDELPVSRELEEELGPSAIPEEQIRQFLRRFYEALDSGDADTAASLFHPGVTIHLWDGVTFTSREEFREWFERLFSTSKDAWREITRLRVEGDTVEVEVVLHFTLN

SEQ ID NO: 1964 - protein, 136 aa, synthetic construct
GQKHCVRLTHTFEFRGNRVTSVRVEIEPLPGSECPVDTSLEEELGPSTIPEEQIRQFLRRFYEALDSGDADTAASLFHPGVTIHLWDGVTFTSREEFREWFERLFSTSKDAWREIVRLRVEGDTVTVEVVLSFTLN

SEQ ID NO: 1965 - protein, 136 aa, synthetic construct
GQKHVVRLTHTFEFRGNRVTEVRVEIEPLPGAEAPVDRSLRERLGPSAIPEEQIRQFLRRFYEALDSGDADTAASLFHPGVTIHLWDGVTFTSREEFREWFERLFSTSKDAWREIVELEVDGDTVTVRVVLHFTLN

SEQ ID NO: 1966 - protein, 136 aa, synthetic construct
GQKHCVRLTHTFVFRGNRVTEVRVEIHVLPGSECPEDLSLQEELGPSSIPEEQIRQFLRRFYEALDSGDADTAASLFHPGVTIHLWDGVTFTSREEFREWFERLFSTSKDAWRRITRLVVDGDTVTVEVVLHFTLN

SEQ ID NO: 1967 - protein, 136 aa, synthetic construct
GQKHAVRLTHRFRFRGNRVTEVEVRIEELPGDELPEDLALREELGPSAIPEEQIRQFLRRFYEALDSGDADTAASLFHPGVTIHLWDGVTFTSREEFREWFERLFSTSKDAWRRITELRVEGDTVEVRVVLHFTLN

SEQ ID NO: 1968 - protein, 136 aa, synthetic construct
GQKHAVRLTHTFRFRGNRVTEVRVEIEELPGDELPIDLSTVEELGPSAIPEEQIRQFLRRFYEALDSGDADTAASLFHPGVTIHLWDGVTFTSREEFREWFERLFSTSKDAWRRITRLVVDGDTVTVEVVLNFTLN

SEQ ID NO: 1969 - protein, 136 aa, synthetic construct
GQKHVVRLTHTFEFRGNRVTRVTVTIEELPGSEAPISRALRERLGPSAIPEEQIRQFLRRFYEALDSGDADTAASLFHPGVTIHLWDGVTFTSREEFREWFERLFSTSKDAWREIVELEVDGDTVTVRVVLSFTLN

SEQ ID NO: 1970 - protein, 136 aa, synthetic construct
GQKHCVRLTHRFVFRGNRVTEVEVEIEELPGSECPISLDLQEELGPSSIPEEQIRQFLRRFYEALDSGDADTAASLFHPGVTIHLWDGVTFTSREEFREWFERLFSTSKDAWRRITRLRVEGDTVTVEVVLSFTLN

SEQ ID NO: 1971 - protein, 136 aa, synthetic construct
GQKHCVRLRHTFRFRGNRVTEVRVEIEELPGSECPVSRELEEELGPSAIPEEQIRQFLRRFYEALDSGDADTAASLFHPGVTIHLWDGVTFTSREEFREWFERLFSTSKDAWREITRLRVEGDTVTVEVVLEFTLN

SEQ ID NO: 1972 - protein, 136 aa, synthetic construct
GQKHVVRLRHTFVFRGNRVTEVRVEIEELPGDEAPISLDTQEELGPSAIPEEQIRQFLRRFYEALDSGDADTAASLFHPGVTIHLWDGVTFTSREEFREWFERLFSTSKDAWRRIVSLRVDGDTVTVEVVLHFTLN

SEQ ID NO: 1973 - protein, 136 aa, synthetic construct
GQKHVVRLRHTFVFRGNRVTEVRVEIEELPGDEDPEDFSFREELGPSAIPEEQIRQFLRRFYEALDSGDADTAASLFHPGVTIHLWDGVTFTSREEFREWFERLFSTSKDAWRRITRLVVDGDTVTVEVVLSFTLN

SEQ ID NO: 1974 - protein, 136 aa, synthetic construct
GQKHAVRLTHTFVFRGNRVTEVRVEIEELPGDEAPISRELRERLGPSAIPEEQIRQFLRRFYEALDSGDADTAASLFHPGVTIHLWDGVTFTSREEFREWFERLFSTSKDAWREITELEVDGDTVTVKVVLHFTLN

SEQ ID NO: 1975 - protein, 136 aa, synthetic construct
GQKHVVRLRHTFRFRGNRVTEVRVEIEELPGSEAPVSLATREELGPSAIPEEQIRQFLRRFYEALDSGDADTAASLFHPGVTIHLWDGVTFTSREEFREWFERLFSTSKDAWRRITELRVEGDTVTVDVVLEFTLN

SEQ ID NO: 1976 - protein, 136 aa, synthetic construct
GQKHCVRLRHTFRFRGNRVTEVRVEIEELPGDEAPVDLSLEERLGPSAIPEEQIRQFLRRFYEALDSGDADTAASLFHPGVTIHLWDGVTFTSREEFREWFERLFSTSKDAWRRITRLEVDGDTVTVEVVLEFTLN

SEQ ID NO: 1977 - protein, 136 aa, synthetic construct
GQKHCVRLTHRFTFRGNRVTHVEVEIEELPGDECPVSLDTREELGPSSIPEEQIRQFLRRFYEALDSGDADTAASLFHPGVTIHLWDGVTFTSREEFREWFERLFSTSKDAWRRITELRVDGDTVTVKVVLHFTLN

SEQ ID NO: 1978 - protein, 136 aa, synthetic construct
GQKHCVRLRHTFRFRGNRVTEVRVEIEELPGDECPEDLSLEERLGPSAIPEEQIRQFLRRFYEALDSGDADTAASLFHPGVTIHLWDGVTFTSREEFREWFERLFSTSKDAWRRITRLEVDGDTVTVEVVLHFTLN

SEQ ID NO: 1979 - protein, 136 aa, synthetic construct
GQKHAVRLTHVFEFRGNRVTEVRVEIEELPGDELPVDLSTREELGPSAIPEEQIRQFLRRFYEALDSGDADTAASLFHPGVTIHLWDGVTFTSREEFREWFERLFSTSKDAWREITELRVEGDTVTVRVVLHFTLN

SEQ ID NO: 1980 - protein, 137 aa, synthetic construct
GQKHLVRLTHRFRFRGNRVTEVEVEIEELPEAESEEEPEFRLEVGGPSSISEEQIRQFLRRFYEALDSGDADTAASLFHPGVTIHLWDGVTFTSREEFREWFERLFSTSKDAWRYIVRLRVDGDTVTVEVVLYFTLN

SEQ ID NO: 1981 - protein, 137 aa, synthetic construct
GQKHLVRLTHRFVFRGNRVTEVEVTIEEDPREESDEEPEFELEVGGPSSISEEQIRQFLRRFYEALDSGDADTAASLFHPGVTIHLWDGVTFTSREEFREWFERLFSTSKDAWRRILRLRVDGDTVTVEVVLYFTLN

SEQ ID NO: 1982 - protein, 137 aa, synthetic construct
GQKHVVRLTHTFRFRGNRVTEVEVRIEELPEDESDEEPEFRLEVGGPSSISEEQIRQFLRRFYEALDSGDADTAASLFHPGVTIHLWDGVTFTSREEFREWFERLFSTSKDAWRYIVELRVDGDTVTVDVVLYFTLN

SEQ ID NO: 1983 - protein, 137 aa, synthetic construct
GQKHVVRLTHTFQFRGNRVTEVRVEIEELPEEESEEEPDFELEVAGPSSISEEQIRQFLRRFYEALDSGDADTAASLFHPGVTIHLWDGVTFTSREEFREWFERLFSTSKDAWREILRLRVEGDTVTVEVLLYFTLN

SEQ ID NO: 1984 - protein, 137 aa, synthetic construct
GQKHVVKLTHTFRFRGNRVTEVRVEITEVPEDELEEEPEFELEVGGPSSISEEQIRQFLRRFYEALDSGDADTAASLFHPGVTIHLWDGVTFTSREEFREWFERLFSTSKDAWRYIVRLRVDGDTVTVEVVLYFTLN

SEQ ID NO: 1985 - protein, 137 aa, synthetic construct
GQKHLVRLTHTFVFRGNRVTEVEVEIEELPESESEEKPEFELEVGGPSSISEEQIRQFLRRFYEALDSGDADTAASLFHPGVTIHLWDGVTFTSREEFREWFERLFSTSKDAWREIVRLRVDGDTVTVEVRLYFTLN

SEQ ID NO: 1986 - protein, 137 aa, synthetic construct
GQKHVVRLTHRFRFRGNRVTEVEVRIEELPESESEEEPNFTLEVGGPSSISEEQIRQFLRRFYEALDSGDADTAASLFHPGVTIHLWDGVTFTSREEFREWFERLFSTSKDAWREIVRLRVDGDTVTVEVVLHFTLN

SEQ ID NO: 1987 - protein, 137 aa, synthetic construct
GQKHVVRLTHTFVFRGNRVTEVRVEIEELPEAESEEEPEFELEVGGPSSISEEQIRQFLRRFYEALDSGDADTAASLFHPGVTIHLWDGVTFTSREEFREWFERLFSTSKDAWREIRRLRVEGDTVTVEVVLYFTLN

SEQ ID NO: 1988 - protein, 137 aa, synthetic construct
GQKHVVRLTHTFVFRGNRVTEVRVEIEELPEAESEEEPEFTLEVGGPSSISEEQIRQFLRRFYEALDSGDADTAASLFHPGVTIHLWDGVTFTSREEFREWFERLFSTSKDAWREILRLRVDGDTVTVEVVLYFTLN

SEQ ID NO: 1989 - protein, 137 aa, synthetic construct
GQKHLVRLTHRFRFRGNRVTEVEVEIEVDPRSESEEEPEFRLRVGGPSSISEEQIRQFLRRFYEALDSGDADTAASLFHPGVTIHLWDGVTFTSREEFREWFERLFSTSKDAWREIVDLEVDGDTVTVRVVLYFTLN

SEQ ID NO: 1990 - protein, 137 aa, synthetic construct
GQKHLVRLTHTFVFRGNRVTEVRVEIEEDPREESEEEPEFRLRVGGPSSISEEQIRQFLRRFYEALDSGDADTAASLFHPGVTIHLWDGVTFTSREEFREWFERLFSTSKDAWREIVELEVDGDTVTVRVVLHFTLN

SEQ ID NO: 1991 - protein, 137 aa, synthetic construct
GQKHVVKLTHTFRFRGNRVTEVRVEIEELPEDESDEELDFELRVGGPSSISEEQIRQFLRRFYEALDSGDADTAASLFHPGVTIHLWDGVTFTSREEFREWFERLFSTSKDAWREIVRLEVDGDTVTVEVRLYFTLN

SEQ ID NO: 1992 - protein, 137 aa, synthetic construct
GQKHLVRLTHRFRFRGNRVTEVEVEIEELPEEESEEEPEFRLEVGGPSSISEEQIRQFLRRFYEALDSGDADTAASLFHPGVTIHLWDGVTFTSREEFREWFERLFSTSKDAWREILRLRVDGDTVTVEVRLYFTLN

SEQ ID NO: 1993 - protein, 137 aa, synthetic construct
GQKHVVRLRHTFVFRGNRVTEVEVEIEELPEDESEEEPEFELEVGGPSSISEEQIRQFLRRFYEALDSGDADTAASLFHPGVTIHLWDGVTFTSREEFREWFERLFSTSKDAWRYIVRLRVDGDTVTVEVVLYFTLN

SEQ ID NO: 1994 - protein, 137 aa, synthetic construct
GQKHLVRLTHTFRFRGNRVTEVRVEIEELPEEESEEEPEFELEVGGPSSISEEQIRQFLRRFYEALDSGDADTAASLFHPGVTIHLWDGVTFTSREEFREWFERLFSTSKDAWREIRRLRVEGDTVTVEVLLYFTLN

SEQ ID NO: 1995 - protein, 137 aa, synthetic construct
GQKHVVLLTHTFVFRGNRVTEVRVEIEELPEEESDEEPEFTVRVGGPSSISEEQIRQFLRRFYEALDSGDADTAASLFHPGVTIHLWDGVTFTSREEFREWFERLFSTSKDAWREILELEVDGDTVTVRVRLYFTLN

SEQ ID NO: 1996 - protein, 137 aa, synthetic construct
GQKHVVRLTHRFRFRGNRVTEVEVEIEELPEEESEEEPEFRLRVGGPSSISEEQIRQFLRRFYEALDSGDADTAASLFHPGVTIHLWDGVTFTSREEFREWFERLFSTSKDAWREITDLEVDGDTVTVRVVLYFTLN

SEQ ID NO: 1997 - protein, 137 aa, synthetic construct
GQKHVVRLTHTFRFRGNRVTEVRVTIEVLPEAETTEEPEFTLEVGGPSSISEEQIRQFLRRFYEALDSGDADTAASLFHPGVTIHLWDGVTFTSREEFREWFERLFSTSKDAWREIVRLRVDGDTVTVEVVLYFTLN

SEQ ID NO: 1998 - protein, 137 aa, synthetic construct
GQKHVVRLTHTFRFRGNRVTEVRVEIEELPEEETEEEPEFVLEVGGPSSISEEQIRQFLRRFYEALDSGDADTAASLFHPGVTIHLWDGVTFTSREEFREWFERLFSTSKDAWRYIVRLRVDGDTVTVEVVLHFTLN

SEQ ID NO: 1999 - protein, 137 aa, synthetic construct
GQKHVVRLRHTFRFRGNRVTEVRVEIEELPEEELDEEPEFELRVEGPSSISEEQIRQFLRRFYEALDSGDADTAASLFHPGVTIHLWDGVTFTSREEFREWFERLFSTSKDAWREIVRLEVRGDTVEVEVVLYFTLN

SEQ ID NO: 2000 - protein, 138 aa, synthetic construct
GQKHWVRLTHTFEFRGNRVTAVRVEITPLPGEAEAEAIRAQRREELGPSAIPEEQIRQFLRRFYEALDSGDADTAASLFHPGVTIHLWDGVTFTSREEFREWFERLFSTSKDAWREIVRLRVDGDTVTVEVVLGFTLN

SEQ ID NO: 2001 - protein, 138 aa, synthetic construct
GQKHWVSLTHRFEFRGNRVTRVEVRITPLPGREEAERLRAQRREELGPSAIPEEQIRQFLRRFYEALDSGDADTAASLFHPGVTIHLWDGVTFTSREEFREWFERLFSTSKDAWREIVRLEVRGDTVTVEVVLEFTLN

SEQ ID NO: 2002 - protein, 138 aa, synthetic construct
GQKHTVALRHTFHFRGNRVTEVEVEIRPLPGREEAEAIRAQRREELGPSAIPEEQIRQFLRRFYEALDSGDADTAASLFHPGVTIHLWDGVTFTSREEFREWFERLFSTSKDAWREIVRLVVDGDTVTVEVVLDFTLN

SEQ ID NO: 2003 - protein, 138 aa, synthetic construct
GQKHWVALTHTFRFRGNRVTEVTVEITPLPGEAEAEALRAQRREVLGPSAIPEEQIRQFLRRFYEALDSGDADTAASLFHPGVTIHLWDGVTFTSREEFREWFERLFSTSKDAWREIVELEVDGDTVTVRVVLGFTLN

SEQ ID NO: 2004 - protein, 138 aa, synthetic construct
GQKHYVALTHTFEFRGNRVTRVTVEIRPLPGREEAEALRAQRREVLGPSAIPEEQIRQFLRRFYEALDSGDADTAASLFHPGVTIHLWDGVTFTSREEFREWFERLFSTSKDAWREIVRLEVDGDTVTVEVVLEFTLN

SEQ ID NO: 2005 - protein, 138 aa, synthetic construct
GQKHYVALTHTFRFRGNRVTEVRVEIRPLPGEEEAAALRAQRREVLGPSAIPEEQIRQFLRRFYEALDSGDADTAASLFHPGVTIHLWDGVTFTSREEFREWFERLFSTSKDAWREIVELEVDGDTVTVRVVLSFTLN

SEQ ID NO: 2006 - protein, 138 aa, synthetic construct
GQKHYVALTHTFRFRGNRVTEVRVEITPLPGREEAEALRAQRREVLGPSAIPEEQIRQFLRRFYEALDSGDADTAASLFHPGVTIHLWDGVTFTSREEFREWFERLFSTSKDAWREIVRLEVRGDTVVVDVVLEFTLN

SEQ ID NO: 2007 - protein, 138 aa, synthetic construct
GQKHWVALTHTFRFRGNRVTEVTVEIRPLPGEAEAAALRAQRREELGPSAIPEEQIRQFLRRFYEALDSGDADTAASLFHPGVTIHLWDGVTFTSREEFREWFERLFSTSKDAWREIVRLVVDGDTVTVEVVLEFTLN

SEQ ID NO: 2008 - protein, 138 aa, synthetic construct
GQKHYVSLTHTFRFRGNRVTEVRVEIRPLPGEEEAAALRAQRREELGPSAIPEEQIRQFLRRFYEALDSGDADTAASLFHPGVTIHLWDGVTFTSREEFREWFERLFSTSKDAWREIVRLVVDGDTVTVEVVLEFTLN

SEQ ID NO: 2009 - protein, 138 aa, synthetic construct
GQKHYVALTHTFRFRGNRVTEVEVRITPLPGEAEAEALRAQREERLGPSAIPEEQIRQFLRRFYEALDSGDADTAASLFHPGVTIHLWDGVTFTSREEFREWFERLFSTSKDAWREIVRLVVEGDTVTVEVVLSFTLN

SEQ ID NO: 2010 - protein, 138 aa, synthetic construct
GQKHWVALRHTFRFRGNRVTEVRVEITPLPGEEEAEALRAQRREELGPSAIPEEQIRQFLRRFYEALDSGDADTAASLFHPGVTIHLWDGVTFTSREEFREWFERLFSTSKDAWREIVRLEVRGDTVVVEVVLSFTLN

SEQ ID NO: 2011 - protein, 138 aa, synthetic construct
GQKHWVSLRHTFRFRGNRVTEVRVEITPLPGEEEAEELRAQRRVELGPSAIPEEQIRQFLRRFYEALDSGDADTAASLFHPGVTIHLWDGVTFTSREEFREWFERLFSTSKDAWREIVRLEVRGDTVTVEVVLRFTLN

SEQ ID NO: 2012 - protein, 138 aa, synthetic construct
GQKHWVALRHTFEFRGNRVTRVTVEITPLPGEAEAAALRAQRREELGPSAIPEEQIRQFLRRFYEALDSGDADTAASLFHPGVTIHLWDGVTFTSREEFREWFERLFSTSKDAWREIVRLTVDGDTVTVDVVLEFTLN

SEQ ID NO: 2013 - protein, 138 aa, synthetic construct
GQKHWVALTHRFEFRGNRVTRVEVRIEPLPGEAEAAALRAQRAERLGPSAIPEEQIRQFLRRFYEALDSGDADTAASLFHPGVTIHLWDGVTFTSREEFREWFERLFSTSKDAWREIVTLEVDGDTVTVRVVLSFTLN

SEQ ID NO: 2014 - protein, 138 aa, synthetic construct
GQKHYVALRHTFVFRGNRVTEVRVEITPLPGEEEAEALRAQRREVLGPSTIPEEQIRQFLRRFYEALDSGDADTAASLFHPGVTIHLWDGVTFTSREEFREWFERLFSTSKDAWREIVRLEVDGDTVTVEVVLSFTLN

SEQ ID NO: 2015 - protein, 138 aa, synthetic construct
GQKHYVALTHTFRFRGNRVTEVRVEITPLPGREEAEALRAQRAERLGPSAIPEEQIRQFLRRFYEALDSGDADTAASLFHPGVTIHLWDGVTFTSREEFREWFERLFSTSKDAWREIVQLEVEGDTVTVRVVLDFTLN

SEQ ID NO: 2016 - protein, 138 aa, synthetic construct
GQKHYVALTHTFRFRGNRVTEVRVEITPLPGEAEAEALRAQRAEELGPSAIPEEQIRQFLRRFYEALDSGDADTAASLFHPGVTIHLWDGVTFTSREEFREWFERLFSTSKDAWREIVQLRVDGDTVEVRVVLSFTLN

SEQ ID NO: 2017 - protein, 138 aa, synthetic construct
GQKHYVRLTHTFEFRGNRVTRVTVEITPLPGREEAEAIRAQRREVLGPSAIPEEQIRQFLRRFYEALDSGDADTAASLFHPGVTIHLWDGVTFTSREEFREWFERLFSTSKDAWREIVRLEVRGDTVTVEVVLDFTLN

SEQ ID NO: 2018 - protein, 138 aa, synthetic construct
GQKHYVKLTHTFRFRGNRVTEVRVEITPLPGEEEAAAIRAQRREELGPSAIPEEQIRQFLRRFYEALDSGDADTAASLFHPGVTIHLWDGVTFTSREEFREWFERLFSTSKDAWREIVRLVVDGDTVTVEVVLEFTLN

SEQ ID NO: 2019 - protein, 138 aa, synthetic construct
GQKHTVALTHTFRFRGNRVTEVTVEITPLPGEAEAEALRAQRREELGPSAIPEEQIRQFLRRFYEALDSGDADTAASLFHPGVTIHLWDGVTFTSREEFREWFERLFSTSKDAWREIVQLRVEGDTVTVRVVLDFTLN

SEQ ID NO: 2020 - protein, 139 aa, synthetic construct
GQKHVVRLRHVFRFRGNRVTEVTVEIEPLPSEEEAERLRAQRSERFSPDVPISEEQIRQFLRRFYEALDSGDADTAASLFHPGVTIHLWDGVTFTSREEFREWFERLFSTSKDAWREIVSLEVRGDTVTVDVVLYFTLN

SEQ ID NO: 2021 - protein, 139 aa, synthetic construct
GQKHVVRLRHRFRFRGNRVTEVEVEIEPLASEEEGEALRAARREAFSPDCPISEEQIRQFLRRFYEALDSGDADTAASLFHPGVTIHLWDGVTFTSREEFREWFERLFSTSKDAWREIVRLEVRGDTVEVEVVLTFTLN

SEQ ID NO: 2022 - protein, 139 aa, synthetic construct
GQKHVVRLRHTFEFRGNRVTRVEVEIFPLESEEEAQALLAQRREEFSPDCPVPEEQIRQFLRRFYEALDSGDADTAASLFHPGVTIHLWDGVTFTSREEFREWFERLFSTSKDAWREIVELRVEGDTVTVEVVLYFTLN

SEQ ID NO: 2023 - protein, 139 aa, synthetic construct
GQKHYVRLTHTFRFRGNRVTEVRVEIHPLASREEAEALRAQREEEVSPDVPVPEEQIRQFLRRFYEALDSGDADTAASLFHPGVTIHLWDGVTFTSREEFREWFERLFSTSKDAWREIVRLVVRGDTVTVEVVLEFTLN

SEQ ID NO: 2024 - protein, 139 aa, synthetic construct
GQKHWVELEHTFRFRGNRVTEVEVRIHPLASREEAEALRAQREEEVSPDVPISEEQIRQFLRRFYEALDSGDADTAASLFHPGVTIHLWDGVTFTSREEFREWFERLFSTSKDAWREIVRLVVRGDTVTVRVVLEFTLN

SEQ ID NO: 2025 - protein, 139 aa, synthetic construct
GQKHVVRLRHVFRFRGNRVTEVRVEIFPLASEEEAEALRAARREAFSPDVPVPEEQIRQFLRRFYEALDSGDADTAASLFHPGVTIHLWDGVTFTSREEFREWFERLFSTSKDAWREIVRLEVDGDTVTVEVVLYFTLN

SEQ ID NO: 2026 - protein, 139 aa, synthetic construct
GQKHYVALTHTFEFRGNRVTAVRVEIHPLASEEEAEALRAARAEAVSPDVPPSEEQIRQFLRRFYEALDSGDADTAASLFHPGVTIHLWDGVTFTSREEFREWFERLFSTSKDAWREIVRLEVRGDTVTVEVVLRFTLN

SEQ ID NO: 2027 - protein, 139 aa, synthetic construct
GQKHWVRLTHTFHFRGNRVTEVEVRIEPLPSREEAEALRAQRSERFSPDCPIPEEQIRQFLRRFYEALDSGDADTAASLFHPGVTIHLWDGVTFTSREEFREWFERLFSTSKDAWREIVRLEVEGDTVTVEVVLEFTLN

SEQ ID NO: 2028 - protein, 139 aa, synthetic construct
GQKHVVKLRHVFEFRGNRVTSVRVEIYPLPSEEEGEALRKQRSERFSPDCPISEEQIRQFLRRFYEALDSGDADTAASLFHPGVTIHLWDGVTFTSREEFREWFERLFSTSKDAWREIVRLEVEGDTVTVEVVLTFTLN

SEQ ID NO: 2029 - protein, 139 aa, synthetic construct
GQKHVVRLEHVFEFRGNRVTRVEVKIFPLASEEEAQALRAQREEEVSPDVPPSEEQIRQFLRRFYEALDSGDADTAASLFHPGVTIHLWDGVTFTSREEFREWFERLFSTSKDAWREIVSLRVRGDTVTVEVVLEFTLN

SEQ ID NO: 2030 - protein, 139 aa, synthetic construct
GQKHVVELTHTFRFRGNRVTEVRVEIHPLPSEEEAEALRAQRRERVSPDVPISEEQIRQFLRRFYEALDSGDADTAASLFHPGVTIHLWDGVTFTSREEFREWFERLFSTSKDAWREIVSLEVDGDTVTVRVVLRFTLN

SEQ ID NO: 2031 - protein, 139 aa, synthetic construct
GQKHVVRLRHTFEFRGNRVTRVTVEIEPLASEAEAEALRAQREERVSPDVPVSEEQIRQFLRRFYEALDSGDADTAASLFHPGVTIHLWDGVTFTSREEFREWFERLFSTSKDAWREIVRLEVEGDTVTVEVVLSFTLN

SEQ ID NO: 2032 - protein, 139 aa, synthetic construct
GQKHVVRLRHTFEFRGNRVTRVTVEIEPLPSLEEAEALRAQRREAVSPDVPVSEEQIRQFLRRFYEALDSGDADTAASLFHPGVTIHLWDGVTFTSREEFREWFERLFSTSKDAWREIVRLEVRGDTVVVEVVLEFTLN

SEQ ID NO: 2033 - protein, 139 aa, synthetic construct
GQKHVVRLRHTFEFRGNRVTAVRVEIHPLASEEEGEALRAQRRERFSPDCPISEEQIRQFLRRFYEALDSGDADTAASLFHPGVTIHLWDGVTFTSREEFREWFERLFSTSKDAWREIVRLEVEGDTVTVEVVLTFTLN

SEQ ID NO: 2034 - protein, 139 aa, synthetic construct
GQKHVVRLTHTFRFRGNRVTSVEVRIEPLASEAEAAALRAARREAFSPDCPVSEEQIRQFLRRFYEALDSGDADTAASLFHPGVTIHLWDGVTFTSREEFREWFERLFSTSKDAWREIVSLEVDGDTVTVTVVLTFTLN

SEQ ID NO: 2035 - protein, 139 aa, synthetic construct
GQKHVVRLTHTFHFRGNRVTHVEVRIEPLASEEEAEALRAQRREAFSPDVPVSEEQIRQFLRRFYEALDSGDADTAASLFHPGVTIHLWDGVTFTSREEFREWFERLFSTSKDAWREIVRLEVDGDTVTVEVVLYFTLN

SEQ ID NO: 2036 - protein, 139 aa, synthetic construct
GQKHVVRLRHVFRFRGNRVTEVTVRIEPLASREEAEALRAQREEAFSPDCPVSEEQIRQFLRRFYEALDSGDADTAASLFHPGVTIHLWDGVTFTSREEFREWFERLFSTSKDAWREIVRLVVEGDTVTVEVVLEFTLN

SEQ ID NO: 2037 - protein, 139 aa, synthetic construct
GQKHVVRLRHTFVFRGNRVTEVRVEIEELPSREEAEELRAKREEEVSPDVPVPEEQIRQFLRRFYEALDSGDADTAASLFHPGVTIHLWDGVTFTSREEFREWFERLFSTSKDAWREIVRLRVRGDTVEVEVVLEFTLN

SEQ ID NO: 2038 - protein, 139 aa, synthetic construct
GQKHVVRLTHRFRFRGNRVTEVEVRIEPLPSEEEGERLRAERREAFSPDTPVSEEQIRQFLRRFYEALDSGDADTAASLFHPGVTIHLWDGVTFTSREEFREWFERLFSTSKDAWREIYELEVRGDTVTVRVVLTFTLN

SEQ ID NO: 2039 - protein, 139 aa, synthetic construct
GQKHVVALRHVFRFRGNRVTEVTVEIEPLASEEEAEALRAQRREAFSPDCPVSEEQIRQFLRRFYEALDSGDADTAASLFHPGVTIHLWDGVTFTSREEFREWFERLFSTSKDAWREIVELEVRGDTVTVRVVLSFTLN

SEQ ID NO: 2040 - protein, 140 aa, synthetic construct
GQKHYVALTHTFRFRGNRVTEVRVEIEEVESEEELEALAAEHPPRLEGTPGSIPEEQIRQFLRRFYEALDSGDADTAASLFHPGVTIHLWDGVTFTSREEFREWFERLFSTSKDAWRRILTLRVEGDTVTVRVGLSFTLN

SEQ ID NO: 2041 - protein, 140 aa, synthetic construct
GQKHYVVLRHTFVFRGNRVTEVEVTIEEVASEAELEAIAAAHPPRLTGTPGSIPEEQIRQFLRRFYEALDSGDADTAASLFHPGVTIHLWDGVTFTSREEFREWFERLFSTSKDAWRRIFTLDVDGDTVTVLVGLRFTLN

SEQ ID NO: 2042 - protein, 140 aa, synthetic construct
GQKHYVVLTHTFRFRGNRVTEVRVTIEEVESRAEMEALAEAHPPRLTGTPGSIPEEQIRQFLRRFYEALDSGDADTAASLFHPGVTIHLWDGVTFTSREEFREWFERLFSTSKDAWRRILTLDVDGDTVTVLVALEFTLN

SEQ ID NO: 2043 - protein, 140 aa, synthetic construct
GQKHYVRLTHTFEFRGNRVTRVEVRIEELESRAEAEAFAAEHPPRLTGTPGSIPEEQIRQFLRRFYEALDSGDADTAASLFHPGVTIHLWDGVTFTSREEFREWFERLFSTSKDAWRRILTLEVDGDTVTVLVLLEFTLN

SEQ ID NO: 2044 - protein, 140 aa, synthetic construct
GQKHYVVLRHTFRFRGNRVTEVRVEIEEVESEAELEALRAEHPPRLTGTPGSIPEEQIRQFLRRFYEALDSGDADTAASLFHPGVTIHLWDGVTFTSREEFREWFERLFSTSKDAWREILTLDVDGDTVTVLVALRFTLN

SEQ ID NO: 2045 - protein, 140 aa, synthetic construct
GQKHYVALTHTFRFRGNRVTEVRVEITEVASEEELEALAAAHPPRLTGTPGSIPEEQIRQFLRRFYEALDSGDADTAASLFHPGVTIHLWDGVTFTSREEFREWFERLFSTSKDAWRRILTLDVDGDTVTVLVALRFTLN

SEQ ID NO: 2046 - protein, 140 aa, synthetic construct
GQKHYVALRHTFVFRGNRVTSVRVEIEEVASEAELEALRAAHPPRLTGTPGSIPEEQIRQFLRRFYEALDSGDADTAASLFHPGVTIHLWDGVTFTSREEFREWFERLFSTSKDAWREIWTLDVDGDTVTVLVALRFTLN

SEQ ID NO: 2047 - protein, 140 aa, synthetic construct
GQKHYVALTHTFVFRGNRVTEVRVEITPVASEAELEALRAAHPPRLTGTPGSIPEEQIRQFLRRFYEALDSGDADTAASLFHPGVTIHLWDGVTFTSREEFREWFERLFSTSKDAWREILTLDVDGDTVTVLVGLRFTLN

SEQ ID NO: 2048 - protein, 140 aa, synthetic construct
GQKHYVRLTHVFEFRGNRVTRVEVRIEPVASRAELEALAAAHPPRLTGTPGSIPEEQIRQFLRRFYEALDSGDADTAASLFHPGVTIHLWDGVTFTSREEFREWFERLFSTSKDAWRRILTLDVDGDTVTVLVGLEFTLN

SEQ ID NO: 2049 - protein, 140 aa, synthetic construct
GQKHYVLLRHTFEFRGNRVTSVRVEITPVASEAELEALAAAHPPRLEGTPGSIPEEQIRQFLRRFYEALDSGDADTAASLFHPGVTIHLWDGVTFTSREEFREWFERLFSTSKDAWRRILTLRVDGDTVTVLVALSFTLN

SEQ ID NO: 2050 - protein, 140 aa, synthetic construct
GQKHYVLLRHTFRFRGNRVTEVEVEITEVESEAELEALRAEHPPRLEGTPGSIPEEQIRQFLRRFYEALDSGDADTAASLFHPGVTIHLWDGVTFTSREEFREWFERLFSTSKDAWREILTLRVDGDTVEVLVALRFTLN

SEQ ID NO: 2051 - protein, 140 aa, synthetic construct
GQKHYVVLTHTFRFRGNRVTEVRVEITPVASEEEAAAIAAAHPPALTGTPGSIPEEQIRQFLRRFYEALDSGDADTAASLFHPGVTIHLWDGVTFTSREEFREWFERLFSTSKDAWRRILRLEVDGDTVTVLVVLSFTLN

SEQ ID NO: 2052 - protein, 140 aa, synthetic construct
GQKHYVALTHTFRFRGNRVTEVRVEIEEVESRAELEALAAAHPPRLTGTPGSIPEEQIRQFLRRFYEALDSGDADTAASLFHPGVTIHLWDGVTFTSREEFREWFERLFSTSKDAWRRILTLDVDGDTVTVLVGLEFTLN

SEQ ID NO: 2053 - protein, 140 aa, synthetic construct
GQKHYVVLTHTFRFRGNRVTEVRVEIREVESREEAEAIAAAHPPRLEGTPGSIPEEQIRQFLRRFYEALDSGDADTAASLFHPGVTIHLWDGVTFTSREEFREWFERLFSTSKDAWRRILQLRVDGDTVTVLVVLEFTLN

SEQ ID NO: 2054 - protein, 140 aa, synthetic construct
GQKHYVVLEHTFTFRGNRVTSVEVRITEVESRAEAEAFAKEHPPRLTGTPGSIPEEQIRQFLRRFYEALDSGDADTAASLFHPGVTIHLWDGVTFTSREEFREWFERLFSTSKDAWRRIVTLDVDGDTVTVLVVLEFTLN

SEQ ID NO: 2055 - protein, 140 aa, synthetic construct
GQKHYVVLRHEFEFRGNRVTSVRVTITPVASEAELAALAAAHPPRLTGTPGSIPEEQIRQFLRRFYEALDSGDADTAASLFHPGVTIHLWDGVTFTSREEFREWFERLFSTSKDAWRRILTLDVDGDTVTVLVALSFTLN

SEQ ID NO: 2056 - protein, 140 aa, synthetic construct
GQKHWVALRHTFRFRGNRVTEVRVEITPLASEAEAAALAAAHPPALTGTPGSIPEEQIRQFLRRFYEALDSGDADTAASLFHPGVTIHLWDGVTFTSREEFREWFERLFSTSKDAWRRILTLAVDGDTVTVLVLLSFTLN

SEQ ID NO: 2057 - protein, 140 aa, synthetic construct
GQKHYVALTHTFVFRGNRVTEVTVEIEEVASEAELEALRAAHPPRLTGTPGSIPEEQIRQFLRRFYEALDSGDADTAASLFHPGVTIHLWDGVTFTSREEFREWFERLFSTSKDAWREILTLEVDGDTVTVRVALSFTLN

SEQ ID NO: 2058 - protein, 140 aa, synthetic construct
GQKHYVVLTHTFVFRGNRVTEVRVEIEEVESEEEAEAWRAAHPPRLTGTPGSIPEEQIRQFLRRFYEALDSGDADTAASLFHPGVTIHLWDGVTFTSREEFREWFERLFSTSKDAWREITQLEVDGDTVTVRVVLSFTLN

SEQ ID NO: 2059 - protein, 140 aa, synthetic construct
GQKHYVVLTHTFRFRGNRVTEVRVEIREVESRAEMEAIAEEHPPRLTGTPGSIPEEQIRQFLRRFYEALDSGDADTAASLFHPGVTIHLWDGVTFTSREEFREWFERLFSTSKDAWRRILTLDVDGDTVTVLVALEFTLN

SEQ ID NO: 2060 - protein, 141 aa, synthetic construct
GQKHTVRLLHLFEFRGNRVTEVWVVIEDVETGEIANPELLAEILARLGQHAASLSEEQIRQFLRRFYEALDSGDADTAASLFHPGVTIHLWDGVTFTSREEFREWFERLFSTSKDAWRRILELRVNGDTVLVRVELEFTLN

SEQ ID NO: 2061 - protein, 141 aa, synthetic construct
GQKHTVRLTHLFEFRGNRVTEVWVVIEDVETGEIANPELLAEIHARLGQHGASLSEEQIRQFLRRFYEALDSGDADTAASLFHPGVTIHLWDGVTFTSREEFREWFERLFSTSKDAWRHIERLEVNGDTVLVEVTLEFTLN

SEQ ID NO: 2062 - protein, 141 aa, synthetic construct
GQKHTVRLVHRFVFRGNRVTEVRVVIEDVETGTIANPELLAEIEAAAGQHGASLSEEQIRQFLRRFYEALDSGDADTAASLFHPGVTIHLWDGVTFTSREEFREWFERLFSTSKDAWRRIEELRVNGDTVVVRVTLEFTLN

SEQ ID NO: 2063 - protein, 141 aa, synthetic construct
GQKHTVRLTHLFRFRGNRVTEVLVVIEDVATGEIANPELLEEIEARLGEAAASLTEEQIRQFLRRFYEALDSGDADTAASLFHPGVTIHLWDGVTFTSREEFREWFERLFSTSKDAWRRIEELRVNGDTVLVRVTLEFTLN

SEQ ID NO: 2064 - protein, 141 aa, synthetic construct
GQKHTVRLRHLFRFRGNRVTEVWVVIEDVETGTIANPALLEEILAALGQSEASLSEEQIRQFLRRFYEALDSGDADTAASLFHPGVTIHLWDGVTFTSREEFREWFERLFSTSKDAWREILRLEVHGDTVLVEVELTFTLN

SEQ ID NO: 2065 - protein, 141 aa, synthetic construct
GQKHTVRLRHLFEFRGNRVTEVWVVIEDVETGEVANPELLAEIEARLGQHGASLSEEQIRQFLRRFYEALDSGDADTAASLFHPGVTIHLWDGVTFTSREEFREWFERLFSTSKDAWREILRLEVNGDTVLVEVELTFTLN

SEQ ID NO: 2066 - protein, 141 aa, synthetic construct
GQKHEVRLTHLFRFRGNRVTEVLVVIEDVETGEIANPELLAEIEARLGESGASLTEEQIRQFLRRFYEALDSGDADTAASLFHPGVTIHLWDGVTFTSREEFREWFERLFSTSKDAWREIEELRVNGDTVLVRVRLTFTLN

SEQ ID NO: 2067 - protein, 141 aa, synthetic construct
GQKHRVRLRHLFRFRGNRVTEVLVVIEDVETGEIANPELLARIEAELGQHPASLTEEQIRQFLRRFYEALDSGDADTAASLFHPGVTIHLWDGVTFTSREEFREWFERLFSTSKDAWRRILRLEVHGDTVLVEVELEFTLN

SEQ ID NO: 2068 - protein, 141 aa, synthetic construct
GQKHTVRLLHLFVFRGNRVTEVLVVIEDVETGEIANPELLAEIERLLGQHGASLTEEQIRQFLRRFYEALDSGDADTAASLFHPGVTIHLWDGVTFTSREEFREWFERLFSTSKDAWREILELRVNGDTVLVRVRLTFTLN

SEQ ID NO: 2069 - protein, 141 aa, synthetic construct
GQKHTVRLRHLFVFRGNRVTEVWVVIEDVETGEIANPELLELIERRLGEHEASLSEEQIRQFLRRFYEALDSGDADTAASLFHPGVTIHLWDGVTFTSREEFREWFERLFSTSKDAWRRILELRVNGDTVLVEVELTFTLN

SEQ ID NO: 2070 - protein, 141 aa, synthetic construct
GQKHRVRLTHLFEFRGNRVTEVWVVIEDVETGEIANPELLEEIHARLGEHGASLSEEQIRQFLRRFYEALDSGDADTAASLFHPGVTIHLWDGVTFTSREEFREWFERLFSTSKDAWRHILRLEVNGDTVLVEVELEFTLN

SEQ ID NO: 2071 - protein, 141 aa, synthetic construct
GQKHTVRLTHLFRFRGNRVTEVLVVIEDVETGEIANPELLEQIEALLGQSPASLTEEQIRQFLRRFYEALDSGDADTAASLFHPGVTIHLWDGVTFTSREEFREWFERLFSTSKDAWREIEELRVNGDTVLVRVTLTFTLN

SEQ ID NO: 2072 - protein, 141 aa, synthetic construct
GQKHTVRLRHLFRFRGNRVTEVWVVIEDVETGEIANPELLARIEAELGRSEASLSEEQIRQFLRRFYEALDSGDADTAASLFHPGVTIHLWDGVTFTSREEFREWFERLFSTSKDAWREIRRLEVHGDTVLVEVELTFTLN

SEQ ID NO: 2073 - protein, 141 aa, synthetic construct
GQKHTVRLRHLFRFRGNRVTEVRVVIEDVETGTIANPELLAQIEAELGQHAASLTEEQIRQFLRRFYEALDSGDADTAASLFHPGVTIHLWDGVTFTSREEFREWFERLFSTSKDAWRHIDELRVNGDTVLVDVTLTFTLN

SEQ ID NO: 2074 - protein, 141 aa, synthetic construct
GQKHTVRLVHLFVFRGNRVTEVRVVIEDVETGEVANPELLAEIEARLGQHGASLSEEQIRQFLRRFYEALDSGDADTAASLFHPGVTIHLWDGVTFTSREEFREWFERLFSTSKDAWRHIEELRVNGDTVLVRVTLEFTLN

SEQ ID NO: 2075 - protein, 141 aa, synthetic construct
GQKHTVRLRHLFRFRGNRVTEVWVVIEDVETGEIANPELLAEILARLGQSGASLTEEQIRQFLRRFYEALDSGDADTAASLFHPGVTIHLWDGVTFTSREEFREWFERLFSTSKDAWRHIDRLEVNGDTVLVEVTLEFTLN

SEQ ID NO: 2076 - protein, 141 aa, synthetic construct
GQKHEVELEHLFIFRGNRVTEVLVVIHDVETGEIANPELLARIHAELGRHGASLTEEQIRQFLRRFYEALDSGDADTAASLFHPGVTIHLWDGVTFTSREEFREWFERLFSTSKDAWREILELEVNGDTVLVRVRLTFTLN

SEQ ID NO: 2077 - protein, 141 aa, synthetic construct
GQKHTVRLTHLFVFRGNRVTEVLVVIEDVETGEIANPALLAEIHARLGQHAASLSEEQIRQFLRRFYEALDSGDADTAASLFHPGVTIHLWDGVTFTSREEFREWFERLFSTSKDAWRHIEELRVNGDTVLVRVTLEFTLN

SEQ ID NO: 2078 - protein, 141 aa, synthetic construct
GQKHVVRLVHRFVFRGNRVTEVLVVIEDVETGEIANPELLERIRAELGRHGASLSEEQIRQFLRRFYEALDSGDADTAASLFHPGVTIHLWDGVTFTSREEFREWFERLFSTSKDAWREILRLEVNGDTVLVEVRLEFTLN

SEQ ID NO: 2079 - protein, 141 aa, synthetic construct
GQKHTVKLVHLFEFRGNRVTRVLVVIEDVETGEIANPELLKEILERLGQHGASLSEEQIRQFLRRFYEALDSGDADTAASLFHPGVTIHLWDGVTFTSREEFREWFERLFSTSKDAWRHIEELRVNGDTVLVKVTLEFTLN

SEQ ID NO: 2080 - protein, 142 aa, synthetic construct
GQKHEVALVHLFRFRGNRVTEVEVRIFEVKDGDEEELLERAWEEFLARVSSEASLSEEQIRQFLRRFYEALDSGDADTAASLFHPGVTIHLWDGVTFTSREEFREWFERLFSTSKDAWREILRLEVVGDTVVVVVRLTFTLN

SEQ ID NO: 2081 - protein, 142 aa, synthetic construct
GQKHRVALVHTFRFRGNRVTEVEVRIFPVTDGDEEAQLAAARDAALARLSSEASLSEEQIRQFLRRFYEALDSGDADTAASLFHPGVTIHLWDGVTFTSREEFREWFERLFSTSKDAWREILDLEVVGDTVVVTVRLEFTLN

SEQ ID NO: 2082 - protein, 142 aa, synthetic construct
GQKHRVGLVHTFRFRGNRVTEVEVRIFPFTDGDEEAQLAAAREAALATLSSEASLSEEQIRQFLRRFYEALDSGDADTAASLFHPGVTIHLWDGVTFTSREEFREWFERLFSTSKDAWREILALEVVGDTVVVTVRLEFTLN

SEQ ID NO: 2083 - protein, 142 aa, synthetic construct
GQKHRVGLVHTFRFRGNRVTEVEVRIFEFTDGDLEAQLDAAFEEALATLASEAELSEEQIRQFLRRFYEALDSGDADTAASLFHPGVTIHLWDGVTFTSREEFREWFERLFSTSKDAWRRILRLEVVGDTVVVTVELDFTLN

SEQ ID NO: 2084 - protein, 142 aa, synthetic construct
GQKHRVGLVHTFRFRGNRVTEVRVRIFPFTGGDEAALLQAAREEELARLSSEASLSEEQIRQFLRRFYEALDSGDADTAASLFHPGVTIHLWDGVTFTSREEFREWFERLFSTSKDAWRHIEALEVVGDTVVVTVRLDFTLN

SEQ ID NO: 2085 - protein, 142 aa, synthetic construct
GQKHTVALVHVFRFRGNRVTEVRVEIFPVTDGDEAALLDAAWARHLATLASAAELTEEQIRQFLRRFYEALDSGDADTAASLFHPGVTIHLWDGVTFTSREEFREWFERLFSTSKDAWRRILRLEVVGDTVVVTVRLEFTLN

SEQ ID NO: 2086 - protein, 142 aa, synthetic construct
GQKHRVGLVHTFRFRGNRVTEVRVRIFDFTDGDEEELLEAAWREELARVASEAELTEEQIRQFLRRFYEALDSGDADTAASLFHPGVTIHLWDGVTFTSREEFREWFERLFSTSKDAWREIERLEVVGDTVVVTVRLTFTLN

SEQ ID NO: 2087 - protein, 142 aa, synthetic construct
GQKHRVGLVHRFRFRGNRVTEVEVRIFPFTDGDLEAKLEAAFEEALATVSSEASLSEEQIRQFLRRFYEALDSGDADTAASLFHPGVTIHLWDGVTFTSREEFREWFERLFSTSKDAWRRILRLEVVGDTVVVTVELEFTLN

SEQ ID NO: 2088 - protein, 142 aa, synthetic construct
GQKHRVALVHTFRFRGNRVTEVRVEIFEVKDGDEEEKLEAAFERHLATLSSEASLSEEQIRQFLRRFYEALDSGDADTAASLFHPGVTIHLWDGVTFTSREEFREWFERLFSTSKDAWRRIERLEVVGDTVVVTVTLEFTLN

SEQ ID NO: 2089 - protein, 142 aa, synthetic construct
GQKHRVALVHTFRFRGNRVTEVEVDIFEVEGGDEEEKLEAAWRRHLATLASEAELSEEQIRQFLRRFYEALDSGDADTAASLFHPGVTIHLWDGVTFTSREEFREWFERLFSTSKDAWRRILRLEVVGDTVVVTVLLDFTLN

SEQ ID NO: 2090 - protein, 142 aa, synthetic construct
GQKHRVGLVHTFRFRGNRVTEVRVRIFPFTDGDEAEQLDAAWAAELAKLASAAELSEEQIRQFLRRFYEALDSGDADTAASLFHPGVTIHLWDGVTFTSREEFREWFERLFSTSKDAWREILRLDVVGDTVVVTVRLEFTLN

SEQ ID NO: 2091 - protein, 142 aa, synthetic construct
GQKHRVGLVHTFRFRGNRVTEVRVEIFEFTDGDEAEKLEAARAAALATLSSPASLSEEQIRQFLRRFYEALDSGDADTAASLFHPGVTIHLWDGVTFTSREEFREWFERLFSTSKDAWREILDLEVVGDTVVVTVRLTFTLN

SEQ ID NO: 2092 - protein, 142 aa, synthetic construct
GQKHEVALVHRFRFRGNRVTEVEVEIFEVTDGDEEEKLEAARARHLATLSSEAELSEEQIRQFLRRFYEALDSGDADTAASLFHPGVTIHLWDGVTFTSREEFREWFERLFSTSKDAWREILALEVVGDTVVVTVRLTFTLN

SEQ ID NO: 2093 - protein, 142 aa, synthetic construct
GQKHLVALVHTFRFRGNRVTEVRVDIFDVKDGDEEAQLEAAWAEHLATLSSEASLTEEQIRQFLRRFYEALDSGDADTAASLFHPGVTIHLWDGVTFTSREEFREWFERLFSTSKDAWREILRLEVVGDTVVVTVRLEFTLN

SEQ ID NO: 2094 - protein, 142 aa, synthetic construct
GQKHTVGLVHTFRFRGNRVTEVRVEIFPVTDGDEAALLEAAWARALATLASEASLSEEQIRQFLRRFYEALDSGDADTAASLFHPGVTIHLWDGVTFTSREEFREWFERLFSTSKDAWRRIERLEVVGDTVVVTVRLEFTLN

SEQ ID NO: 2095 - protein, 142 aa, synthetic construct
GQKHTVALVHTFRFRGNRVTEVEVRIFEVKDGDEEEKLEAAWREALATLASEAELTEEQIRQFLRRFYEALDSGDADTAASLFHPGVTIHLWDGVTFTSREEFREWFERLFSTSKDAWRHIERLEVVGDTVVVTVRLEFTLN

SEQ ID NO: 2096 - protein, 142 aa, synthetic construct
GQKHRVGLVHTFRFRGNRVTEVRVRIFPVTDGDEEALLDAAWEAELAKLSSPASLTEEQIRQFLRRFYEALDSGDADTAASLFHPGVTIHLWDGVTFTSREEFREWFERLFSTSKDAWRRILRLDVVGDTVVVTVELEFTLN

SEQ ID NO: 2097 - protein, 142 aa, synthetic construct
GQKHRVGLVHRFRFRGNRVTEVEVEIFEFTDGNEEELLEAAERRFLATLSSEASLTEEQIRQFLRRFYEALDSGDADTAASLFHPGVTIHLWDGVTFTSREEFREWFERLFSTSKDAWREILRLRVVGDTVVVTVRLEFTLN

SEQ ID NO: 2098 - protein, 142 aa, synthetic construct
GQKHRVGLVHTFRFRGNRVTEVRVDIFEFKDGDEEEKLEAAWRRHLATLASEAELTEEQIRQFLRRFYEALDSGDADTAASLFHPGVTIHLWDGVTFTSREEFREWFERLFSTSKDAWREILRLDVVGDTVVVTVRLDFTLN

SEQ ID NO: 2099 - protein, 142 aa, synthetic construct
GQKHRVGLVHTFRFRGNRVTEVRVRIFEFTDGDEEALLERAWAEELATLSSAAELSEEQIRQFLRRFYEALDSGDADTAASLFHPGVTIHLWDGVTFTSREEFREWFERLFSTSKDAWRRILRLEVVGDTVVVTVLLEFTLN

SEQ ID NO: 2100 - protein, 143 aa, synthetic construct
GQKHTVYLVHRFVFRGNRVTEVRVEIVEDTGGEAEAAVDALYERALAELGGRPASLTEEQIRQFLRRFYEALDSGDADTAASLFHPGVTIHLWDGVTFTSREEFREWFERLFSTSKDAWREILRLEVDGDTVVVRVRLEFTLN

SEQ ID NO: 2101 - protein, 143 aa, synthetic construct
GQKHTVYLVHEFVFRGNRVTEVRVEIVEDTGGAAEEAVDALWAAALARLGGRPASLTEEQIRQFLRRFYEALDSGDADTAASLFHPGVTIHLWDGVTFTSREEFREWFERLFSTSKDAWREILRLEVDGDTVVVRVRLEFTLN

SEQ ID NO: 2102 - protein, 143 aa, synthetic construct
GQKHTVYLVHTFRFRGNRVTEVEVEIVEDDGGEAEERVNALWERARARLGGRPAELSEEQIRQFLRRFYEALDSGDADTAASLFHPGVTIHLWDGVTFTSREEFREWFERLFSTSKDAWREILELEVDGDTVVVRVRLDFTLN

SEQ ID NO: 2103 - protein, 143 aa, synthetic construct
GQKHTVYLVHTFVFRGNRVTEVRVEIVEDTGGEFEARLDALWEAALARLGGRPASLTEEQIRQFLRRFYEALDSGDADTAASLFHPGVTIHLWDGVTFTSREEFREWFERLFSTSKDAWREILRLEVDGDTVVVRVRLEFTLN

SEQ ID NO: 2104 - protein, 143 aa, synthetic construct
GQKHRVGLVHSFVFRGNRVTEVRVRIVEDDGGSFEEKLRALWEEELARLGGRPAELTEEQIRQFLRRFYEALDSGDADTAASLFHPGVTIHLWDGVTFTSREEFREWFERLFSTSKDAWRRILRLEVDGDTVVVVVELEFTLN

SEQ ID NO: 2105 - protein, 143 aa, synthetic construct
GQKHTVYLVHTFRFRGNRVTEVEVEIVEDTGGEFEEKLNALWEEAKARLGGRPATLSEEQIRQFLRRFYEALDSGDADTAASLFHPGVTIHLWDGVTFTSREEFREWFERLFSTSKDAWREILELEVDGDTVVVRVRLEFTLN

SEQ ID NO: 2106 - protein, 143 aa, synthetic construct
GQKHTVYLVHTFRFRGNRVTEVEVRIVEDTGGSAEAEVDALWEEALARLGGRPASLTEEQIRQFLRRFYEALDSGDADTAASLFHPGVTIHLWDGVTFTSREEFREWFERLFSTSKDAWRRILRLEVDGDTVVVRVRLEFTLN

SEQ ID NO: 2107 - protein, 143 aa, synthetic construct
GQKHTVYLVHTFVFRGNRVTEVRVEIVEDTGGSFEEELEALWERALARLGGRPASLTEEQIRQFLRRFYEALDSGDADTAASLFHPGVTIHLWDGVTFTSREEFREWFERLFSTSKDAWREILRLEVDGDTVVVVVRLTFTLN

SEQ ID NO: 2108 - protein, 143 aa, synthetic construct
GQKHRVGLVHTFRFRGNRVTEVRVRIVEDTGGSFEPELEAAWEAALAELGGRPASLTEEQIRQFLRRFYEALDSGDADTAASLFHPGVTIHLWDGVTFTSREEFREWFERLFSTSKDAWREILRLEVDGDTVVVVVRLDFTLN

SEQ ID NO: 2109 - protein, 143 aa, synthetic construct
GQKHTVYLVHTFVFRGNRVTEVEVRIVEDTGGAYQEAVDALWEAALAALGGRPASLTEEQIRQFLRRFYEALDSGDADTAASLFHPGVTIHLWDGVTFTSREEFREWFERLFSTSKDAWREIERLTVDGDTVVVRVRLEFTLN

SEQ ID NO: 2110 - protein, 143 aa, synthetic construct
GQKHTVYLVHTFVFRGNRVTEVRVDIVEDKGGSFEPELEALFEAAKAALGGRPASLSEEQIRQFLRRFYEALDSGDADTAASLFHPGVTIHLWDGVTFTSREEFREWFERLFSTSKDAWREILRLEVDGDTVVVTVKLEFTLN

SEQ ID NO: 2111 - protein, 143 aa, synthetic construct
GQKHTVYLVHTFRFRGNRVTEVEVRIVEDDGGEAEEKVEALYEEALAALGGRPAELTEEQIRQFLRRFYEALDSGDADTAASLFHPGVTIHLWDGVTFTSREEFREWFERLFSTSKDAWREILRLEVDGDTVVVVVRLTFTLN

SEQ ID NO: 2112 - protein, 143 aa, synthetic construct
GQKHTVYLVHSFVFRGNRVTEVRVRIVEDKGGSYEEELEALWEEELAELGGRPASLTEEQIRQFLRRFYEALDSGDADTAASLFHPGVTIHLWDGVTFTSREEFREWFERLFSTSKDAWRRILRLEVDGDTVVVVVELEFTLN

SEQ ID NO: 2113 - protein, 143 aa, synthetic construct
GQKHTVYLVHTFRFRGNRVTEVRVEIVEDTEGEWWEKVEALYQRALAELGGRPAELTEEQIRQFLRRFYEALDSGDADTAASLFHPGVTIHLWDGVTFTSREEFREWFERLFSTSKDAWREILRLEVDGDTVVVVVRLEFTLN

SEQ ID NO: 2114 - protein, 143 aa, synthetic construct
GQKHTVYLVHTFRFRGNRVTEVRVRIVDDDGGAADAALDALWAAARAELGGRPAELSEEQIRQFLRRFYEALDSGDADTAASLFHPGVTIHLWDGVTFTSREEFREWFERLFSTSKDAWREILRLEVDGDTVVVRVRLDFTLN

SEQ ID NO: 2115 - protein, 143 aa, synthetic construct
GQKHVVYLVHRFRFRGNRVTEVEVTIVEDTGGDAEAALDAAWAAALAALGGRPAELTEEQIRQFLRRFYEALDSGDADTAASLFHPGVTIHLWDGVTFTSREEFREWFERLFSTSKDAWREILRLEVDGDTVVVRVRLEFTLN

SEQ ID NO: 2116 - protein, 143 aa, synthetic construct
GQKHTVYLVHTFRFRGNRVTEVRVEIVEDDGGAAEAALEALWAAARAALGGRPASLSEEQIRQFLRRFYEALDSGDADTAASLFHPGVTIHLWDGVTFTSREEFREWFERLFSTSKDAWRRILRLEVDGDTVVVTVRLEFTLN

SEQ ID NO: 2117 - protein, 143 aa, synthetic construct
GQKHTVGLVHTFRFRGNRVTEVRVDIVEDTGGSYEEALDALYEAALAELGGRPASLSEEQIRQFLRRFYEALDSGDADTAASLFHPGVTIHLWDGVTFTSREEFREWFERLFSTSKDAWREILRLTVDGDTVVVRVRLEFTLN

SEQ ID NO: 2118 - protein, 143 aa, synthetic construct
GQKHTVYLVHTFRFRGNRVTEVRVEIVEDTGGEAEPALAAAWAAARAALGGRPASLTEEQIRQFLRRFYEALDSGDADTAASLFHPGVTIHLWDGVTFTSREEFREWFERLFSTSKDAWRRILRLEVDGDTVVVVVRLEFTLN

SEQ ID NO: 2119 - protein, 143 aa, synthetic construct
GQKHTVYLVHTFVFRGNRVTEVRVEIVEDTGGEREAAVEALWERARAALGGRPASLTEEQIRQFLRRFYEALDSGDADTAASLFHPGVTIHLWDGVTFTSREEFREWFERLFSTSKDAWREILRLEVDGDTVVVVVRLEFTLN

SEQ ID NO: 2120 - protein, 144 aa, synthetic construct
GQKHVVVLGHLFRFRGNRVTEVEVRIRPVPGSGGEEELLAELFAEFRARMGGGGAEISEEQIRQFLRRFYEALDSGDADTAASLFHPGVTIHLWDGVTFTSREEFREWFERLFSTSKDAWRRIERLEVEGDTVVVVVRLEFTLN

SEQ ID NO: 2121 - protein, 144 aa, synthetic construct
GQKHRVVLAHRFVFRGNRVTEVEVRIRPVPGEGGEEELLEELFAEEAARMGGGGAEISEEQIRQFLRRFYEALDSGDADTAASLFHPGVTIHLWDGVTFTSREEFREWFERLFSTSKDAWRRIERLRVEGDTVVVVVVLEFTLN

SEQ ID NO: 2122 - protein, 144 aa, synthetic construct
GQKHTVVLVHVFRFRGNRVTEVEVRIRPVPGEGGEEALLDELFEEAAARMGGGGAEISEEQIRQFLRRFYEALDSGDADTAASLFHPGVTIHLWDGVTFTSREEFREWFERLFSTSKDAWREIRRLRVEGDTVVVVVRLTFTLN

SEQ ID NO: 2123 - protein, 144 aa, synthetic construct
GQKHVVVLGHLFRFRGNRVTEVEVEIEPVPGSGGEEELLRRLFERFRARMGGGGAEISEEQIRQFLRRFYEALDSGDADTAASLFHPGVTIHLWDGVTFTSREEFREWFERLFSTSKDAWRRIERLEVVGDTVVVVVRLEFTLN

SEQ ID NO: 2124 - protein, 144 aa, synthetic construct
GQKHVVVLGHRFVFRGNRVTEVEVEIEPVPGEGGEEELLERLFERFLAEMGGGGAEISEEQIRQFLRRFYEALDSGDADTAASLFHPGVTIHLWDGVTFTSREEFREWFERLFSTSKDAWRRIERLRVEGDTVVVVVRLEFTLN

SEQ ID NO: 2125 - protein, 144 aa, synthetic construct
GQKHVVVLGHRFWFRGNRVTRVEVRIRPVPGEGGEKELLEELFEEFRAEMGGGGAEISEEQIRQFLRRFYEALDSGDADTAASLFHPGVTIHLWDGVTFTSREEFREWFERLFSTSKDAWREIERLEVEGDTVVVVVRLTFTLN

SEQ ID NO: 2126 - protein, 144 aa, synthetic construct
GQKHVVVLGHLFRFRGNRVTEVEVRIRPVPGSGGEEALLEELFEEFRARMGGGGAEISEEQIRQFLRRFYEALDSGDADTAASLFHPGVTIHLWDGVTFTSREEFREWFERLFSTSKDAWREIERLEVVGDTVVVVVRLTFTLN

SEQ ID NO: 2127 - protein, 144 aa, synthetic construct
GQKHVVVLVHVFRFRGNRVTEVRVRIRPVPGEGGEEELLEELFAEAAAAMGGGGAEISEEQIRQFLRRFYEALDSGDADTAASLFHPGVTIHLWDGVTFTSREEFREWFERLFSTSKDAWRRIERLRVEGDTVVVVVRLEFTLN

SEQ ID NO: 2128 - protein, 144 aa, synthetic construct
GQKHRVVLGHLFRFRGNRVTEVEVEIRPVEGEGGEEELLEELFARFRARMGGGGAEISEEQIRQFLRRFYEALDSGDADTAASLFHPGVTIHLWDGVTFTSREEFREWFERLFSTSKDAWREIRRLEVVGDTVVVTVVLDFTLN

SEQ ID NO: 2129 - protein, 144 aa, synthetic construct
GQKHRVVLRHVFRFRGNRVTEVRVRIRPVPGEGGEEALLAELRDEALAEMGGGGAEISEEQIRQFLRRFYEALDSGDADTAASLFHPGVTIHLWDGVTFTSREEFREWFERLFSTSKDAWREIRELVVEGDTVVVTVVLTFTLN

SEQ ID NO: 2130 - protein, 144 aa, synthetic construct
GQKHRVVLGHRFVFRGNRVTEVEVRIRPVPDEGGEEALLAELLAELEAELGGGGAEISEEQIRQFLRRFYEALDSGDADTAASLFHPGVTIHLWDGVTFTSREEFREWFERLFSTSKDAWRRIERLVVEGDTVAVVVRLEFTLN

SEQ ID NO: 2131 - protein, 144 aa, synthetic construct
GQKHVVVLVHRFRFRGNRVTEVEVEIRPVPGEGGEEALLEELFERARAAMGGGGAEISEEQIRQFLRRFYEALDSGDADTAASLFHPGVTIHLWDGVTFTSREEFREWFERLFSTSKDAWREIERLEVEGDTVVVVVRLTFTLN

SEQ ID NO: 2132 - protein, 144 aa, synthetic construct
GQKHRVVLGHLFRFRGNRVTEVEVEIRPVPGEGGEEALLEELFERFRARMGGGGAEISEEQIRQFLRRFYEALDSGDADTAASLFHPGVTIHLWDGVTFTSREEFREWFERLFSTSKDAWREIVRLEVEGDTVVVVVRLDFTLN

SEQ ID NO: 2133 - protein, 144 aa, synthetic construct
GQKHVVVLGHRFRFRGNRVTEVEVRIRPVPGEGGEEALLEELFAEFEAEMGGGGAEISEEQIRQFLRRFYEALDSGDADTAASLFHPGVTIHLWDGVTFTSREEFREWFERLFSTSKDAWREIERLRVVGDTVVVVVRLTFTLN

SEQ ID NO: 2134 - protein, 144 aa, synthetic construct
GQKHVVVLAHRFRFRGNRVTEVEVRIRPVPGEGGEEELLRELFEEERARMGGGGAEISEEQIRQFLRRFYEALDSGDADTAASLFHPGVTIHLWDGVTFTSREEFREWFERLFSTSKDAWREIVRLEVVGDTVVVVVRLEFTLN

SEQ ID NO: 2135 - protein, 144 aa, synthetic construct
GQKHTVVLGHRFVFRGNRVTEVEVRIRPVPGSGGEEELLRELFEEFAARMGGGGAEISEEQIRQFLRRFYEALDSGDADTAASLFHPGVTIHLWDGVTFTSREEFREWFERLFSTSKDAWRRIERLRVEGDTVVVVVVLEFTLN

SEQ ID NO: 2136 - protein, 144 aa, synthetic construct
GQKHVVVLGHRFWFRGNRVTRVEVRIRPVEGEGGEEELLEELFAEFAAAMGGGGAEISEEQIRQFLRRFYEALDSGDADTAASLFHPGVTIHLWDGVTFTSREEFREWFERLFSTSKDAWRRIERLRVEGDTVVVVVRLEFTLN

SEQ ID NO: 2137 - protein, 144 aa, synthetic construct
GQKHVVVLVHVFRFRGNRVTEVEVRIRPVPDEGGEEELLAELFEEAVARMGGGGAEISEEQIRQFLRRFYEALDSGDADTAASLFHPGVTIHLWDGVTFTSREEFREWFERLFSTSKDAWREIRRLRVEGDTVVVVVRLTFTLN

SEQ ID NO: 2138 - protein, 144 aa, synthetic construct
GQKHVVVLVHVFRFRGNRVTEVEVRIRPVPGEGGEEALLEELFEEAAAAMGGGGAEISEEQIRQFLRRFYEALDSGDADTAASLFHPGVTIHLWDGVTFTSREEFREWFERLFSTSKDAWREIERLRVEGDTVVVVVRLEFTLN

SEQ ID NO: 2139 - protein, 144 aa, synthetic construct
GQKHRVVLGHLFRFRGNRVTEVEVRIRPVPGSGGEEALLQELEEEFLARLGGGGAEISEEQIRQFLRRFYEALDSGDADTAASLFHPGVTIHLWDGVTFTSREEFREWFERLFSTSKDAWREIRRLRVEGDTVVVTVVLDFTLN

SEQ ID NO: 2140 - protein, 145 aa, synthetic construct
GQKHTVVLVHVFRFRGNRVTEVEVEIFPAAPDELEATLARALALADEYVRRLARGASLSEEQIRQFLRRFYEALDSGDADTAASLFHPGVTIHLWDGVTFTSREEFREWFERLFSTSKDAWREILRLEVVGDTVVVVVRLDFTLN

SEQ ID NO: 2141 - protein, 145 aa, synthetic construct
GQKHTVVLVHVFRFRGNRVTEVRVEIFPAAPDDEAATLARARALAARLYEELARPASLSEEQIRQFLRRFYEALDSGDADTAASLFHPGVTIHLWDGVTFTSREEFREWFERLFSTSKDAWREILDLRVRGDTVVVVVRLTFTLN

SEQ ID NO: 2142 - protein, 145 aa, synthetic construct
GQKHTVYLVHVFRFRGNRVTEVEVEIFPAAPDAEEAALARALARADALAAALARPASLSEEQIRQFLRRFYEALDSGDADTAASLFHPGVTIHLWDGVTFTSREEFREWFERLFSTSKDAWREILRLEVRGDTVVVVVRLEFTLN

SEQ ID NO: 2143 - protein, 145 aa, synthetic construct
GQKHRVVLVHVFRFRGNRVTEVEVEIFPAAPDRLEETLARARERADRLVEELARGASLTEEQIRQFLRRFYEALDSGDADTAASLFHPGVTIHLWDGVTFTSREEFREWFERLFSTSKDAWRRILDLRVVGDTVVVVVELEFTLN

SEQ ID NO: 2144 - protein, 145 aa, synthetic construct
GQKHTVVLVHVFLFRGNRVTEVRVEIFPAAPDELEATLARALALADRLYEELARGASLSEEQIRQFLRRFYEALDSGDADTAASLFHPGVTIHLWDGVTFTSREEFREWFERLFSTSKDAWREILRLEVRGDTVVVVVRLTFTLN

SEQ ID NO: 2145 - protein, 145 aa, synthetic construct
GQKHVVVLVHVFRFRGNRVTEVEVRIFPAAPDALEETLARARALADELYERLARGASLSEEQIRQFLRRFYEALDSGDADTAASLFHPGVTIHLWDGVTFTSREEFREWFERLFSTSKDAWREILELRVRGDTVVVVVRLEFTLN

SEQ ID NO: 2146 - protein, 145 aa, synthetic construct
GQKHRVVLVHVFRFRGNRVTEVRVEIFPVAPDRLEEARARALALADRYVAALARGASLSEEQIRQFLRRFYEALDSGDADTAASLFHPGVTIHLWDGVTFTSREEFREWFERLFSTSKDAWRRILRLEVVGDTVVVVVELEFTLN

SEQ ID NO: 2147 - protein, 145 aa, synthetic construct
GQKHVVVLVHLFRFRGNRVTEVRVEIFPVAPDELEEAIRRALELAERLYEEHARGASLSEEQIRQFLRRFYEALDSGDADTAASLFHPGVTIHLWDGVTFTSREEFREWFERLFSTSKDAWREILELRVRGDTVVVVVRLTFTLN

SEQ ID NO: 2148 - protein, 145 aa, synthetic construct
GQKHTVVLVHVFRFRGNRVTEVRVEIFPAAPDRREETLAKALALADELVARLAGPASLSEEQIRQFLRRFYEALDSGDADTAASLFHPGVTIHLWDGVTFTSREEFREWFERLFSTSKDAWRRILRLEVVGDTVVVVVELEFTLN

SEQ ID NO: 2149 - protein, 145 aa, synthetic construct
GQKHTVVLVHVFRFRGNRVTEVRVEIFPAAPDELEEAIARARALADKLYEELAGPASLSEEQIRQFLRRFYEALDSGDADTAASLFHPGVTIHLWDGVTFTSREEFREWFERLFSTSKDAWRRILDLRVRGDTVVVVVVLEFTLN

SEQ ID NO: 2150 - protein, 145 aa, synthetic construct
GQKHTVVLVHLFRFRGNRVTEVEVRIFPAAPDEEEETLAKALELADRLFAEHARPASLTEEQIRQFLRRFYEALDSGDADTAASLFHPGVTIHLWDGVTFTSREEFREWFERLFSTSKDAWREILRLEVRGDTVVVVVKLTFTLN

SEQ ID NO: 2151 - protein, 145 aa, synthetic construct
GQKHTVVLVHVFRFRGNRVTEVEVEIFPAAPDRLEEALARALARADALAAELARGASLSEEQIRQFLRRFYEALDSGDADTAASLFHPGVTIHLWDGVTFTSREEFREWFERLFSTSKDAWRRIERLEVRGDTVVVVVVLEFTLN

SEQ ID NO: 2152 - protein, 145 aa, synthetic construct
GQKHTVVLVHVFRFRGNRVTEVEVRIFPAAPDELEATLARARALADELYAALAGPASLTEEQIRQFLRRFYEALDSGDADTAASLFHPGVTIHLWDGVTFTSREEFREWFERLFSTSKDAWREILDLRVRGDTVVVVVRLTFTLN

SEQ ID NO: 2153 - protein, 145 aa, synthetic construct
GQKHTVVLVHTFRFRGNRVTEVRVEIFPAAPDRLEETLARALALGDELVAALARGASLTEEQIRQFLRRFYEALDSGDADTAASLFHPGVTIHLWDGVTFTSREEFREWFERLFSTSKDAWRRIVDLRVVGDTVVVVVVLEFTLN

SEQ ID NO: 2154 - protein, 145 aa, synthetic construct
GQKHTVVLVHLFRFRGNRVTEVRVEIFPVAPDEREEALARALALADELVAAEARGASLSEEQIRQFLRRFYEALDSGDADTAASLFHPGVTIHLWDGVTFTSREEFREWFERLFSTSKDAWRRILDLRVVGDTVVVVVELEFTLN

SEQ ID NO: 2155 - protein, 145 aa, synthetic construct
GQKHTVFLVHLFRFRGNRVTEVRVEIFPAAPDDREAALARALELADRLYAEHARGASLSEEQIRQFLRRFYEALDSGDADTAASLFHPGVTIHLWDGVTFTSREEFREWFERLFSTSKDAWRRILRLRVRGDTVVVVVELTFTLN

SEQ ID NO: 2156 - protein, 145 aa, synthetic construct
GQKHTVVLVHVFRFRGNRVTEVRVEIFPVAPDEEEAALARALALADRLVAELARGASLSEEQIRQFLRRFYEALDSGDADTAASLFHPGVTIHLWDGVTFTSREEFREWFERLFSTSKDAWREILRLEVVGDTVVVVVRLTFTLN

SEQ ID NO: 2157 - protein, 145 aa, synthetic construct
GQKHVVVLVHVFRFRGNRVTEVRVEIFPVAPDEREEALERARALAEEYAARLARPASLSEEQIRQFLRRFYEALDSGDADTAASLFHPGVTIHLWDGVTFTSREEFREWFERLFSTSKDAWRRILDLRVVGDTVVVVVELEFTLN

SEQ ID NO: 2158 - protein, 145 aa, synthetic construct
GQKHTVVLVHVFRFRGNRVTEVRVEIFPAAPDRLEEALARALALADRLVEELARPASLSEEQIRQFLRRFYEALDSGDADTAASLFHPGVTIHLWDGVTFTSREEFREWFERLFSTSKDAWREILRLEVVGDTVVVVVRLDFTLN

SEQ ID NO: 2159 - protein, 145 aa, synthetic construct
GQKHTVVLVHVFRFRGNRVTEVRVEIFPAAPDALEETLARALALAEEYYAALAGPASLSEEQIRQFLRRFYEALDSGDADTAASLFHPGVTIHLWDGVTFTSREEFREWFERLFSTSKDAWREILDLRVRGDTVVVVVRLTFTLN

SEQ ID NO: 2160 - protein, 146 aa, synthetic construct
GQKHIVVLVHLFRFRGNRVTEVRVEIIEVESEAALPAALAEARALADEWLAAHAGPASISEEQIRQFLRRFYEALDSGDADTAASLFHPGVTIHLWDGVTFTSREEFREWFERLFSTSKDAWREILELRVVGDTVVVVVKLEFTLN

SEQ ID NO: 2161 - protein, 146 aa, synthetic construct
GQKHIVVLVHVFVFRGNRVTEVRVEIIPVESEEALPEAIARALALADEYVAALARPASISEEQIRQFLRRFYEALDSGDADTAASLFHPGVTIHLWDGVTFTSREEFREWFERLFSTSKDAWRRILELRVVGDTVVVVVVLEFTLN

SEQ ID NO: 2162 - protein, 146 aa, synthetic construct
GQKHIVVLVHLFLFRGNRVTEVRVEIIEVESEEDLPAALARARALADELLARHARPASISEEQIRQFLRRFYEALDSGDADTAASLFHPGVTIHLWDGVTFTSREEFREWFERLFSTSKDAWREIEELRVVGDTVVVVVTLTFTLN

SEQ ID NO: 2163 - protein, 146 aa, synthetic construct
GQKHIVVLVHLFRFRGNRVTEVRVEIIEVESEEALPEALARALALADEYLAAHAGPASISEEQIRQFLRRFYEALDSGDADTAASLFHPGVTIHLWDGVTFTSREEFREWFERLFSTSKDAWREIVRLEVRGDTVVVVVVLEFTLN

SEQ ID NO: 2164 - protein, 146 aa, synthetic construct
GQKHIVVLVHLFRFRGNRVTEVEVRIIPVASEADLPAALARARALAEEYLAAHAGPASISEEQIRQFLRRFYEALDSGDADTAASLFHPGVTIHLWDGVTFTSREEFREWFERLFSTSKDAWRRIVELRVRGDTVVVVVVLEFTLN

SEQ ID NO: 2165 - protein, 146 aa, synthetic construct
GQKHYVVLVHLFRFRGNRVTEVEVEIIEVPSEEALPEALARALALADRYLAEHAGPASISEEQIRQFLRRFYEALDSGDADTAASLFHPGVTIHLWDGVTFTSREEFREWFERLFSTSKDAWREILELRVVGDTVVVVVVLKFTLN

SEQ ID NO: 2166 - protein, 146 aa, synthetic construct
GQKHIVVLVHLFLFRGNRVTEVRVEIIEVPDEAALPAALAEARALADELLAAHARGASISEEQIRQFLRRFYEALDSGDADTAASLFHPGVTIHLWDGVTFTSREEFREWFERLFSTSKDAWREIVELRVVGDTVVVVVVLTFTLN

SEQ ID NO: 2167 - protein, 146 aa, synthetic construct
GQKHIVVLVHLFRFRGNRVTEVRVDIIEVESEEKLPEAIARALALADEYLAAHARGASVSEEQIRQFLRRFYEALDSGDADTAASLFHPGVTIHLWDGVTFTSREEFREWFERLFSTSKDAWRRILELRVVGDTVVVVVVLHFTLN

SEQ ID NO: 2168 - protein, 146 aa, synthetic construct
GQKHIVVLVHTFVFRGNRVTEVEVEIIEVESEEALPAALARARALADERLAALARGASISEEQIRQFLRRFYEALDSGDADTAASLFHPGVTIHLWDGVTFTSREEFREWFERLFSTSKDAWRRIEELRVRGDTVVVVVVLEFTLN

SEQ ID NO: 2169 - protein, 146 aa, synthetic construct
GQKHIVVLVHLFRFRGNRVTEVEVRIFEAASEEDLPAVLAEARAEADRLLAEHAGPASISEEQIRQFLRRFYEALDSGDADTAASLFHPGVTIHLWDGVTFTSREEFREWFERLFSTSKDAWRRIEELEVRGDTVVVVVVLHFTLN

SEQ ID NO: 2170 - protein, 146 aa, synthetic construct
GQKHIVVLVHLFRFRGNRVTEVRVEIIEVESEEALPEALARARALAEEYLAAHAGPASVSEEQIRQFLRRFYEALDSGDADTAASLFHPGVTIHLWDGVTFTSREEFREWFERLFSTSKDAWREIVELRVVGDTVVVVVVLHFTLN

SEQ ID NO: 2171 - protein, 146 aa, synthetic construct
GQKHIVVLVHLFRFRGNRVTEVRVEIIEVESEEALPEALARARALADEYLAAHARPASISEEQIRQFLRRFYEALDSGDADTAASLFHPGVTIHLWDGVTFTSREEFREWFERLFSTSKDAWRRIEELRVVGDTVVVVVVLEFTLN

SEQ ID NO: 2172 - protein, 146 aa, synthetic construct
GQKHIVVLVHLFRFRGNRVTEVEVRIIEVESEEALPEALARARALADELLAAHAGPASISEEQIRQFLRRFYEALDSGDADTAASLFHPGVTIHLWDGVTFTSREEFREWFERLFSTSKDAWRRIEELRVRGDTVVVVVTLTFTLN

SEQ ID NO: 2173 - protein, 146 aa, synthetic construct
GQKHIVVLVHLFRFRGNRVTEVEVRIIEVASEADLPAALAEAEALADELLAAHAGPASISEEQIRQFLRRFYEALDSGDADTAASLFHPGVTIHLWDGVTFTSREEFREWFERLFSTSKDAWREIRRLRVRGDTVVVVVVLTFTLN

SEQ ID NO: 2174 - protein, 146 aa, synthetic construct
GQKHIVVLVHLFRFRGNRVTEVEVEIIEVESEEALPEALEKALALAEEYLAAHAGPASISEEQIRQFLRRFYEALDSGDADTAASLFHPGVTIHLWDGVTFTSREEFREWFERLFSTSKDAWREILRLEVRGDTVVVVVKLTFTLN

SEQ ID NO: 2175 - protein, 146 aa, synthetic construct
GQKHIVVLVHLFRFRGNRVTEVEVDIIEVESEEDLPAALARARALADEYLARHAGPASISEEQIRQFLRRFYEALDSGDADTAASLFHPGVTIHLWDGVTFTSREEFREWFERLFSTSKDAWREILELRVRGDTVVVVVVLTFTLN

SEQ ID NO: 2176 - protein, 146 aa, synthetic construct
GQKHIVVLVHLFRFRGNRVTEVEVEIIEVESEEALPEALARAEALADRYLAAHAGPASISEEQIRQFLRRFYEALDSGDADTAASLFHPGVTIHLWDGVTFTSREEFREWFERLFSTSKDAWRRIVRLEVRGDTVVVVVVLEFTLN

SEQ ID NO: 2177 - protein, 146 aa, synthetic construct
GQKHIVVLVHLFVFRGNRVTEVRVEIIEVESEEALPEALARARALADELLAAHARPASISEEQIRQFLRRFYEALDSGDADTAASLFHPGVTIHLWDGVTFTSREEFREWFERLFSTSKDAWRRIEELRVVGDTVVVVVVLEFTLN

SEQ ID NO: 2178 - protein, 146 aa, synthetic construct
GQKHIVVLVHLFRFRGNRVTEVEVEIIEVPSEEALPEALARARALADELLAAHAGPASISEEQIRQFLRRFYEALDSGDADTAASLFHPGVTIHLWDGVTFTSREEFREWFERLFSTSKDAWRRILELRVRGDTVVVVVVLEFTLN

SEQ ID NO: 2179 - protein, 146 aa, synthetic construct
GQKHIVVLVHLFLFRGNRVTEVEVEIIEAESEEKLPEALAKALALADEYLAAHARPASISEEQIRQFLRRFYEALDSGDADTAASLFHPGVTIHLWDGVTFTSREEFREWFERLFSTSKDAWRRIVELRVRGDTVVVVVVLEFTLN

SEQ ID NO: 2180 - protein, 147 aa, synthetic construct
GQKHEVLLRHLFRFRGNRVTEVRVAILVLKPAPWLTESQEAQLEELDALWAALAGRPASISEEQIRQFLRRFYEALDSGDADTAASLFHPGVTIHLWDGVTFTSREEFREWFERLFSTSKDAWREILSLRVDGDTVLVEVRLTFTLN

SEQ ID NO: 2181 - protein, 147 aa, synthetic construct
GQKHVVRLLHLFRFRGNRVTEVWVAIRVEKPPPWLKVSNEAQFAELDARWAAAAGAPAEISEEQIRQFLRRFYEALDSGDADTAASLFHPGVTIHLWDGVTFTSREEFREWFERLFSTSKDAWRHIEELEVDGDTVRVRVTLEFTLN

SEQ ID NO: 2182 - protein, 147 aa, synthetic construct
GQKHVVRLRHFFRFRGNRVTEVRVAIEVEKPAPWLTESQTAQFEALDAAWAAAAGAPASISEEQIRQFLRRFYEALDSGDADTAASLFHPGVTIHLWDGVTFTSREEFREWFERLFSTSKDAWRRIESLRVDGDTVLVDVVLEFTLN

SEQ ID NO: 2183 - protein, 147 aa, synthetic construct
GQKHVVRLRHFFRFRGNRVTEVRVAISVEKPPPFLTESTEAQFAELDALWAAAAGRPASISEEQIRQFLRRFYEALDSGDADTAASLFHPGVTIHLWDGVTFTSREEFREWFERLFSTSKDAWRHIESLEVDGDTVRVDVVLEFTLN

SEQ ID NO: 2184 - protein, 147 aa, synthetic construct
GQKHVVRLRHLFVFRGNRVTEVRVAILVEKPAPFLKRSEREQLAELDALWAERRGAPASISEEQIRQFLRRFYEALDSGDADTAASLFHPGVTIHLWDGVTFTSREEFREWFERLFSTSKDAWRRILRLEVDGDTVLVEVELEFTLN

SEQ ID NO: 2185 - protein, 147 aa, synthetic construct
GQKHIVLLRHLFVFRGNRVTEVRVAIEVIKPPPWLTKSQTEQFAELDALWAEHRGRPASISEEQIRQFLRRFYEALDSGDADTAASLFHPGVTIHLWDGVTFTSREEFREWFERLFSTSKDAWREILRLEVDGDTVLVEVRLEFTLN

SEQ ID NO: 2186 - protein, 147 aa, synthetic construct
GQKHVVLLRHFFRFRGNRVTEVRVAIRVEKPPPWLTESNDAQFAELDALWAAAAGRPASISEEQIRQFLRRFYEALDSGDADTAASLFHPGVTIHLWDGVTFTSREEFREWFERLFSTSKDAWREILSLEVDGDTVLVDVRLTFTLN

SEQ ID NO: 2187 - protein, 147 aa, synthetic construct
GQKHVVRLRHLFVFRGNRVTEVRVAIEVEKPPPFLTRSTTELFAELDALWAELAGRPASISEEQIRQFLRRFYEALDSGDADTAASLFHPGVTIHLWDGVTFTSREEFREWFERLFSTSKDAWRSIERLEVDGDTVLVEVRLEFTLN

SEQ ID NO: 2188 - protein, 147 aa, synthetic construct
GQKHVVRLRHLFVFRGNRVTEVRVAIEVVKPPPWLTVSNVAQLAELDAEWAALAGRPASISEEQIRQFLRRFYEALDSGDADTAASLFHPGVTIHLWDGVTFTSREEFREWFERLFSTSKDAWRHIEELRVDGDTVLVDVTLEFTLN

SEQ ID NO: 2189 - protein, 147 aa, synthetic construct
GQKHVVRLRHLFVFRGNRVTEVRVAILVEKPPPFLTVSNEAQLAELDALWAARAGAPASISEEQIRQFLRRFYEALDSGDADTAASLFHPGVTIHLWDGVTFTSREEFREWFERLFSTSKDAWRHIESLEVDGDTVLVDVVLEFTLN

SEQ ID NO: 2190 - protein, 147 aa, synthetic construct
GQKHVVRLRHLFHFRGNRVTEVRVAILVEKPAPFLTESNEAQLAELDALWAAAAGRPASISEEQIRQFLRRFYEALDSGDADTAASLFHPGVTIHLWDGVTFTSREEFREWFERLFSTSKDAWRRIERLEVDGDTVLVEVVLEFTLN

SEQ ID NO: 2191 - protein, 147 aa, synthetic construct
GQKHVVRLRHLFVFRGNRVTEVRVAILVEKPPPFLTESNEAQLEELDALWAELAGRPASISEEQIRQFLRRFYEALDSGDADTAASLFHPGVTIHLWDGVTFTSREEFREWFERLFSTSKDAWREIESLRVDGDTVLVDVRLEFTLN

SEQ ID NO: 2192 - protein, 147 aa, synthetic construct
GQKHVVRLRHLFVFRGNRVTEVRVAIRVVKPAPWLTESNDAQFAELDALWAEHAGRPASISEEQIRQFLRRFYEALDSGDADTAASLFHPGVTIHLWDGVTFTSREEFREWFERLFSTSKDAWRHIDSLEVDGDTVLVDVTLEFTLN

SEQ ID NO: 2193 - protein, 147 aa, synthetic construct
GQKHIVRLRHLFVFRGNRVTEVRVAIEVIKPPPFLTESQEAQFAELDALWAAHAGRPASISEEQIRQFLRRFYEALDSGDADTAASLFHPGVTIHLWDGVTFTSREEFREWFERLFSTSKDAWRHIDRLEVDGDTVLVEVTLEFTLN

SEQ ID NO: 2194 - protein, 147 aa, synthetic construct
GQKHVVRLRHLFVFRGNRVTEVRVAIEVVKPAPFLTKSNTAQFAELDAAWAALAGRPASISEEQIRQFLRRFYEALDSGDADTAASLFHPGVTIHLWDGVTFTSREEFREWFERLFSTSKDAWRHITSLRVDGDTVLVEVELEFTLN

SEQ ID NO: 2195 - protein, 147 aa, synthetic construct
GQKHVVRLRHFFRFRGNRVTEVRVAILVEKPPPWLTRSEEAQLAELEALWAAAAGAPASISEEQIRQFLRRFYEALDSGDADTAASLFHPGVTIHLWDGVTFTSREEFREWFERLFSTSKDAWRHIESLRVDGDTVLVDVRLEFTLN

SEQ ID NO: 2196 - protein, 147 aa, synthetic construct
GQKHVVRLRHFFRFRGNRVTEVRVAILVEKPPPFLTESNEAQLEELDALWAAARGRPASISEEQIRQFLRRFYEALDSGDADTAASLFHPGVTIHLWDGVTFTSREEFREWFERLFSTSKDAWREIESLEVDGDTVLVDVRLEFTLN

SEQ ID NO: 2197 - protein, 147 aa, synthetic construct
GQKHVVRLRHWFRFRGNRVTEVRVAIRVVKPPPFLTESQEAQFAELDALWAEAAGAPASISEEQIRQFLRRFYEALDSGDADTAASLFHPGVTIHLWDGVTFTSREEFREWFERLFSTSKDAWRRILSLEVDGDTVLVEVELEFTLN

SEQ ID NO: 2198 - protein, 147 aa, synthetic construct
GQKHVVRLEHLFRFRGNRVTEVWVAIRVEKPAPFLTESNEEQFAELDARWAALAGAPASISEEQIRQFLRRFYEALDSGDADTAASLFHPGVTIHLWDGVTFTSREEFREWFERLFSTSKDAWRHIESLEVDGDTVRVRVTLEFTLN

SEQ ID NO: 2199 - protein, 147 aa, synthetic construct
GQKHVVRLRHLFVFRGNRVTEVRVAILVEKPAPFLTVSNEAQLAELDALWAAHAGRPASISEEQIRQFLRRFYEALDSGDADTAASLFHPGVTIHLWDGVTFTSREEFREWFERLFSTSKDAWRHIESLEVDGDTVLVDVTLEFTLN

SEQ ID NO: 2200 - protein, 148 aa, synthetic construct
GQKHVVVLIHVFHFRGNRVTEVRVRIREAPVDAVEPVLAEVLEEARRLVAELAAERPEASISEEQIRQFLRRFYEALDSGDADTAASLFHPGVTIHLWDGVTFTSREEFREWFERLFSTSKDAWRRIERLEVVGDTVVVVVVLEFTLN

SEQ ID NO: 2201 - protein, 148 aa, synthetic construct
GQKHVVVLIHVFRFRGNRVTEVEVRIREAPVDDVETVEAEVLAEGERLVAELAAERPEATISEEQIRQFLRRFYEALDSGDADTAASLFHPGVTIHLWDGVTFTSREEFREWFERLFSTSKDAWREILDLRVVGDTVVVVVRLEFTLN

SEQ ID NO: 2202 - protein, 148 aa, synthetic construct
GQKHVVVLIHVFRFRGNRVTEVEVRIFEAPVDDVESVLAEVLAEAEALVAELAAERPEATISEEQIRQFLRRFYEALDSGDADTAASLFHPGVTIHLWDGVTFTSREEFREWFERLFSTSKDAWREIVRLEVVGDTVVVVVRLEFTLN

SEQ ID NO: 2203 - protein, 148 aa, synthetic construct
GQKHVVVLIHVFRFRGNRVTEVRVEIVEAPVDDVEAPLAAVLARGDALVAELAAERPEATISEEQIRQFLRRFYEALDSGDADTAASLFHPGVTIHLWDGVTFTSREEFREWFERLFSTSKDAWRRIERLEVVGDTVVVVVVLEFTLN

SEQ ID NO: 2204 - protein, 148 aa, synthetic construct
GQKHVVVLIHVFHFRGNRVTEVRVEIFEAPVDDVEAPLAEVLERARALVEELAARRPEATISEEQIRQFLRRFYEALDSGDADTAASLFHPGVTIHLWDGVTFTSREEFREWFERLFSTSKDAWREIVELEVVGDTVVVVVVLTFTLN

SEQ ID NO: 2205 - protein, 148 aa, synthetic construct
GQKHVVLLIHVFRFRGNRVTEVEVRIVEAPVDDVEEPLAAVLAEGEALVAELAARRPEATISEEQIRQFLRRFYEALDSGDADTAASLFHPGVTIHLWDGVTFTSREEFREWFERLFSTSKDAWRRIEALRVVGDTVVVVVRLEFTLN

SEQ ID NO: 2206 - protein, 148 aa, synthetic construct
GQKHVVVLIHVFRFRGNRVTEVRVEIYEAPVDDVEEVLAEVLARGEELVAELAATRPGASISEEQIRQFLRRFYEALDSGDADTAASLFHPGVTIHLWDGVTFTSREEFREWFERLFSTSKDAWRRIVKLEVVGDTVVVVVVLEFTLN

SEQ ID NO: 2207 - protein, 148 aa, synthetic construct
GQKHVVVLIHVFRFRGNRVTEVRVEIYPAPVDNVEEVLERVLERADALVAELAATRPGASISEEQIRQFLRRFYEALDSGDADTAASLFHPGVTIHLWDGVTFTSREEFREWFERLFSTSKDAWREIVKLEVVGDTVVVVVVLRFTLN

SEQ ID NO: 2208 - protein, 148 aa, synthetic construct
GQKHVVLLIHVFRFRGNRVTEVRVEIYEAPVDDVEEPLAAVLARAEALVAELAAERPEATISEEQIRQFLRRFYEALDSGDADTAASLFHPGVTIHLWDGVTFTSREEFREWFERLFSTSKDAWREIERLEVVGDTVVVVVRLEFTLN

SEQ ID NO: 2209 - protein, 148 aa, synthetic construct
GQKHVVVLIHVFRFRGNRVTEVEVRIFPAPVDDVEEVLARVLEEGERLVERLRAERPEASISEEQIRQFLRRFYEALDSGDADTAASLFHPGVTIHLWDGVTFTSREEFREWFERLFSTSKDAWRRIERLEVVGDTVVVVVVLEFTLN

SEQ ID NO: 2210 - protein, 148 aa, synthetic construct
GQKHVVVLIHTFVFRGNRVTEVRVEIREAPVDDVESVLAEVLERADALVAELAARRPAASISEEQIRQFLRRFYEALDSGDADTAASLFHPGVTIHLWDGVTFTSREEFREWFERLFSTSKDAWRRIERLEVVGDTVVVVVVLEFTLN

SEQ ID NO: 2211 - protein, 148 aa, synthetic construct
GQKHVVVLIHVFRFRGNRVTEVRVEIYEAPVDDVETVLAEVLARGDALVAELAAERPEATISEEQIRQFLRRFYEALDSGDADTAASLFHPGVTIHLWDGVTFTSREEFREWFERLFSTSKDAWREIVDLRVVGDTVVVVVRLEFTLN

SEQ ID NO: 2212 - protein, 148 aa, synthetic construct
GQKHVVVLIHVFRFRGNRVTEVEVRIREAPVDNVEPVLEEVLAEADALVAELAAERPEASISEEQIRQFLRRFYEALDSGDADTAASLFHPGVTIHLWDGVTFTSREEFREWFERLFSTSKDAWREIERLRVVGDTVVVVVRLEFTLN

SEQ ID NO: 2213 - protein, 148 aa, synthetic construct
GQKHVVVLIHVFHFRGNRVTHVEVEIFEAPVDDVETVLAAVLERADALVAELAATRPAATISEEQIRQFLRRFYEALDSGDADTAASLFHPGVTIHLWDGVTFTSREEFREWFERLFSTSKDAWRRIVRLEVVGDTVVVVVVLEFTLN

SEQ ID NO: 2214 - protein, 148 aa, synthetic construct
GQKHVVVLIHVFRFRGNRVTEVEVRIVEAPVDDVDTVLAEVLAEARRLVEELAARRPEATISEEQIRQFLRRFYEALDSGDADTAASLFHPGVTIHLWDGVTFTSREEFREWFERLFSTSKDAWREIEELRVVGDTVVVVVRLEFTLN

SEQ ID NO: 2215 - protein, 148 aa, synthetic construct
GQKHVVVLIHVFRFRGNRVTEVEVRIVEAPVDDVDSVLAAVLAEGDALVAELAAERPEATISEEQIRQFLRRFYEALDSGDADTAASLFHPGVTIHLWDGVTFTSREEFREWFERLFSTSKDAWREIERLEVVGDTVVVVVRLEFTLN

SEQ ID NO: 2216 - protein, 148 aa, synthetic construct
GQKHVVVLIHVFHFRGNRVTEVRVEIFEAPVDDVEEPLAEVLARAEELVAELAATRPGASISEEQIRQFLRRFYEALDSGDADTAASLFHPGVTIHLWDGVTFTSREEFREWFERLFSTSKDAWRRIVKLEVVGDTVVVVVVLEFTLN

SEQ ID NO: 2217 - protein, 148 aa, synthetic construct
GQKHVVVLIHVFRFRGNRVTEVRVEIYEAPVDDVETPLAEVLARGRALVEELAATRPEATISEEQIRQFLRRFYEALDSGDADTAASLFHPGVTIHLWDGVTFTSREEFREWFERLFSTSKDAWREIVELRVVGDTVVVVVVLTFTLN

SEQ ID NO: 2218 - protein, 148 aa, synthetic construct
GQKHVVVLIHVFRFRGNRVTEVRVEIVEAPVDDVETVLAEVLARAEELVERLAAERPAASISEEQIRQFLRRFYEALDSGDADTAASLFHPGVTIHLWDGVTFTSREEFREWFERLFSTSKDAWREIVDLRVVGDTVVVVVVLEFTLN

SEQ ID NO: 2219 - protein, 148 aa, synthetic construct
GQKHVVVLIHVFRFRGNRVTEVEVEIYPAPVDDVESVLAEVLARGDALVAELAATAPAATISEEQIRQFLRRFYEALDSGDADTAASLFHPGVTIHLWDGVTFTSREEFREWFERLFSTSKDAWRRIVDLRVVGDTVVVVVVLEFTLN

SEQ ID NO: 2220 - protein, 149 aa, synthetic construct
GQKHVVVLVHTFRFRGNRVTEVEVEIIPVPSLSPEAIEAAVEKARALAEERLAELGAPPPSISEEQIRQFLRRFYEALDSGDADTAASLFHPGVTIHLWDGVTFTSREEFREWFERLFSTSKDAWREIVELRVVGDTVVVVVVLHFTLN

SEQ ID NO: 2221 - protein, 149 aa, synthetic construct
GQKHVVVLVHTFVFRGNRVTEVRVEIFPAPDLSPEAIEAAIAKALARADALLAELGAPPPSISEEQIRQFLRRFYEALDSGDADTAASLFHPGVTIHLWDGVTFTSREEFREWFERLFSTSKDAWREIVSLRVVGDTVVVVVVLHFTLN

SEQ ID NO: 2222 - protein, 149 aa, synthetic construct
GQKHVVVLVHSFRFRGNRVTEVRVEIFPVPDLSEEAIEAAVARALALADRLLAEHGDPPPSISEEQIRQFLRRFYEALDSGDADTAASLFHPGVTIHLWDGVTFTSREEFREWFERLFSTSKDAWREIVELRVRGDTVVVVVVLHFTLN

SEQ ID NO: 2223 - protein, 149 aa, synthetic construct
GQKHAVVLVHTFVFRGNRVTEVEVEIIPAPSLDPESIEAAVARAEALADERLARLGAPPASISEEQIRQFLRRFYEALDSGDADTAASLFHPGVTIHLWDGVTFTSREEFREWFERLFSTSKDAWREIRSLRVVGDTVVVVVVLYFTLN

SEQ ID NO: 2224 - protein, 149 aa, synthetic construct
GQKHVVVLVHTFRFRGNRVTEVEVDIFPCPSLSQEAIDAAVARARALAAERLAELGAPPASISEEQIRQFLRRFYEALDSGDADTAASLFHPGVTIHLWDGVTFTSREEFREWFERLFSTSKDAWRRIESLEVRGDTVVVVVVLSFTLN

SEQ ID NO: 2225 - protein, 149 aa, synthetic construct
GQKHVVVLVHTFVFRGNRVTEVRVEIIPCPSLDEASIEAAVAKALALAEARLAELGAPPAEISEEQIRQFLRRFYEALDSGDADTAASLFHPGVTIHLWDGVTFTSREEFREWFERLFSTSKDAWRRIVSLRVVGDTVVVVVVLEFTLN

SEQ ID NO: 2226 - protein, 149 aa, synthetic construct
GQKHAVVLVHTFVFRGNRVTEVRVEIIPCPSLSEEAIEAAIAKALALAEERLAELGAPPASISEEQIRQFLRRFYEALDSGDADTAASLFHPGVTIHLWDGVTFTSREEFREWFERLFSTSKDAWREIVSLTVRGDTVVVVVKLFFTLN

SEQ ID NO: 2227 - protein, 149 aa, synthetic construct
GQKHVVVLVHTFRFRGNRVTEVEVEIIPCPSLDEASIAAAIAEAEALAAERLAELGAPPPSISEEQIRQFLRRFYEALDSGDADTAASLFHPGVTIHLWDGVTFTSREEFREWFERLFSTSKDAWREIVSLRVVGDTVVVVVVLHFTLN

SEQ ID NO: 2228 - protein, 149 aa, synthetic construct
GQKHVVVLVHTFRFRGNRVTEVEVEIFPCPDLSQASIDAALARAAALAEERLAALGAPPAEISEEQIRQFLRRFYEALDSGDADTAASLFHPGVTIHLWDGVTFTSREEFREWFERLFSTSKDAWRRIERLTVRGDTVVVVVRLEFTLN

SEQ ID NO: 2229 - protein, 149 aa, synthetic construct
GQKHVVVLVHTFVFRGNRVTEVEVEIIPCPSLDEASIQAAVARALALAEERLARLGDPPPEISEEQIRQFLRRFYEALDSGDADTAASLFHPGVTIHLWDGVTFTSREEFREWFERLFSTSKDAWRRIVSLTVRGDTVVVVVVLEFTLN

SEQ ID NO: 2230 - protein, 149 aa, synthetic construct
GQKHVVVLVHTFVFRGNRVTEVEVEIIPAPSLDEESIAAAVAEARALAAERLARLGAPPASISEEQIRQFLRRFYEALDSGDADTAASLFHPGVTIHLWDGVTFTSREEFREWFERLFSTSKDAWREIVSLEVRGDTVVVVVVLHFTLN

SEQ ID NO: 2231 - protein, 149 aa, synthetic construct
GQKHVVVLVHTFRFRGNRVTEVEVDIFPCPDLSEESIAAAIARARALAAERLAELGAPPPEISEEQIRQFLRRFYEALDSGDADTAASLFHPGVTIHLWDGVTFTSREEFREWFERLFSTSKDAWRRIVSLEVRGDTVVVVVVLEFTLN

SEQ ID NO: 2232 - protein, 149 aa, synthetic construct
GQKHVVVLVHTFRFRGNRVTEVEVEIFPVPDLSPEAIEAALARARARADERLAELGAPPPEISEEQIRQFLRRFYEALDSGDADTAASLFHPGVTIHLWDGVTFTSREEFREWFERLFSTSKDAWRRIEELRVVGDTVVVVVVLEFTLN

SEQ ID NO: 2233 - protein, 149 aa, synthetic construct
GQKHVVVLVHTFRFRGNRVTEVEVDIFPVPSLDEASIAAAVARARALAAEKLAELGAPPPEISEEQIRQFLRRFYEALDSGDADTAASLFHPGVTIHLWDGVTFTSREEFREWFERLFSTSKDAWRRIESLEVRGDTVVVVVTLHFTLN

SEQ ID NO: 2234 - protein, 149 aa, synthetic construct
GQKHRVVLVHTFRFRGNRVTEVRVEIFPAPDLSPEAIEAAVARARALADELLAELGAPPPEISEEQIRQFLRRFYEALDSGDADTAASLFHPGVTIHLWDGVTFTSREEFREWFERLFSTSKDAWRRIVELRVVGDTVVVVVVLDFTLN

SEQ ID NO: 2235 - protein, 149 aa, synthetic construct
GQKHVVVLVHSFRFRGNRVTEVEVRIFPAPDLSEASIAAAVARARALADELLARHGAPAPSISEEQIRQFLRRFYEALDSGDADTAASLFHPGVTIHLWDGVTFTSREEFREWFERLFSTSKDAWREIVELRVVGDTVVVVVVLHFTLN

SEQ ID NO: 2236 - protein, 149 aa, synthetic construct
GQKHVVVLVHTFRFRGNRVTEVRVEIIPAPSLDEESIEARVAEARRLAEERLAELGDPPPSISEEQIRQFLRRFYEALDSGDADTAASLFHPGVTIHLWDGVTFTSREEFREWFERLFSTSKDAWREIVELRVRGDTVVVVVVLHFTLN

SEQ ID NO: 2237 - protein, 149 aa, synthetic construct
GQKHVVVLVHTFVFRGNRVTEVRVEIFPVPSLDEAAIEAAIARARARADELLAELGAPPASISEEQIRQFLRRFYEALDSGDADTAASLFHPGVTIHLWDGVTFTSREEFREWFERLFSTSKDAWREIVELRVVGDTVVVVVVLHFTLN

SEQ ID NO: 2238 - protein, 149 aa, synthetic construct
GQKHVVVLVHTFVFRGNRVTEVEVEIIPAPDLSEASIQAAIDRAEALAAERLAELGDPPPEISEEQIRQFLRRFYEALDSGDADTAASLFHPGVTIHLWDGVTFTSREEFREWFERLFSTSKDAWREIVSLEVRGDTVVVVVVLHFTLN

SEQ ID NO: 2239 - protein, 149 aa, synthetic construct
GQKHVVVLVHTFRFRGNRVTEVRVEIFPCPSLSEEAIEAALARARARAAALLAELGDPPPSISEEQIRQFLRRFYEALDSGDADTAASLFHPGVTIHLWDGVTFTSREEFREWFERLFSTSKDAWRRIESLEVRGDTVVVVVVLEFTLN

SEQ ID NO: 2240 - protein, 150 aa, synthetic construct
GQKHEVRLRHWFRFRGNRVTEVDVAIVPLTPSPLLQALGQDVAARLAAVEARRAAAAGAPASLSEEQIRQFLRRFYEALDSGDADTAASLFHPGVTIHLWDGVTFTSREEFREWFERLFSTSKDAWREIERLEVDGDTVLVDVRLTFTLN

SEQ ID NO: 2241 - protein, 150 aa, synthetic construct
GQKHRVRLRHYFRFRGNRVTEVRVAIEPLTPSPLLKALGENVAAQLAEFEELRAAARGRPASLTEEQIRQFLRRFYEALDSGDADTAASLFHPGVTIHLWDGVTFTSREEFREWFERLFSTSKDAWRRIVRLEVDGDTVFVEVLLEFTLN

SEQ ID NO: 2242 - protein, 150 aa, synthetic construct
GQKHVVELEHVFRFRGNRVTEVRVAIRVLTPSPLFEALGQVEEEQLAAVEAARAAAAGAPASLSEEQIRQFLRRFYEALDSGDADTAASLFHPGVTIHLWDGVTFTSREEFREWFERLFSTSKDAWREITELEVDGDTVFVRVTLTFTLN

SEQ ID NO: 2243 - protein, 150 aa, synthetic construct
GQKHVVRLDHYFRFRGNRVTEVRVAIRVETPSPLFEALGAVVEEQEAEMEALRAAARGRPASLSEEQIRQFLRRFYEALDSGDADTAASLFHPGVTIHLWDGVTFTSREEFREWFERLFSTSKDAWRHIEELEVDGDTVFVRVRLEFTLN

SEQ ID NO: 2244 - protein, 150 aa, synthetic construct
GQKHTVRLTHYFRFRGNRVTEVRVAIEVLTPSPLFEALGQTVAEQRAEMEALRAAARGAPASLSEEQIRQFLRRFYEALDSGDADTAASLFHPGVTIHLWDGVTFTSREEFREWFERLFSTSKDAWRRIEELEVDGDTVFVRVLLEFTLN

SEQ ID NO: 2245 - protein, 150 aa, synthetic construct
GQKHRVRLTHWFRFRGNRVTEVRVFIEVETPSPLFEALGQVVAEQRAAAAELEAAAAGAPASLSEEQIRQFLRRFYEALDSGDADTAASLFHPGVTIHLWDGVTFTSREEFREWFERLFSTSKDAWRRIERLRVDGDTVFVEVTLEFTLN

SEQ ID NO: 2246 - protein, 150 aa, synthetic construct
GQKHTVRLTHWFRFRGNRVTEVWVAIEVETPSPLFQALGQDVAAQAARMAALRAAAAGRPASLSEEQIRQFLRRFYEALDSGDADTAASLFHPGVTIHLWDGVTFTSREEFREWFERLFSTSKDAWREIEELEVDGDTVFVRVTLTFTLN

SEQ ID NO: 2247 - protein, 150 aa, synthetic construct
GQKHTVRLRHYFDFRGNRVTEVRVVIEPLTPSPLLEALGFNVEELRAEMEELRAAARGRPASLSEEQIRQFLRRFYEALDSGDADTAASLFHPGVTIHLWDGVTFTSREEFREWFERLFSTSKDAWREITELEVDGDTVFVRVTLTFTLN

SEQ ID NO: 2248 - protein, 150 aa, synthetic construct
GQKHTVELVHVFRFRGNRVTEVRVAIRPLTPSPLLQALGAVVEPQLAEVEALRAAAAGAPASLSEEQIRQFLRRFYEALDSGDADTAASLFHPGVTIHLWDGVTFTSREEFREWFERLFSTSKDAWRHITELEVDGDTVFVRVTLEFTLN

SEQ ID NO: 2249 - protein, 150 aa, synthetic construct
GQKHRVRLWHWFRFRGNRVTEVRVAIEVLTPSPLFLALGQNVAPLLAEMEALRAAAAGAPASLTEEQIRQFLRRFYEALDSGDADTAASLFHPGVTIHLWDGVTFTSREEFREWFERLFSTSKDAWRHITELEVVGDTVFVEVELEFTLN

SEQ ID NO: 2250 - protein, 150 aa, synthetic construct
GQKHTVELTHWFRFRGNRVTEVRVAIRPLTPSPLLEALGAVVEEQAAEMEALRAAAAGRPASLSEEQIRQFLRRFYEALDSGDADTAASLFHPGVTIHLWDGVTFTSREEFREWFERLFSTSKDAWREIRELEVDGDTVFVRVLLEFTLN

SEQ ID NO: 2251 - protein, 150 aa, synthetic construct
GQKHTVELEHWFRFRGNRVTEVRVAITPLTPSPLLQALGQDVEALRAEMAELRAAARGAPASLSEEQIRQFLRRFYEALDSGDADTAASLFHPGVTIHLWDGVTFTSREEFREWFERLFSTSKDAWREIEELEVDGDTVFVRVRLEFTLN

SEQ ID NO: 2252 - protein, 150 aa, synthetic construct
GQKHRVELVHWFRFRGNRVTEVRVAIRVLTPSPLHQALGQTVAEQLAEMEALRAAAAGAPASLSEEQIRQFLRRFYEALDSGDADTAASLFHPGVTIHLWDGVTFTSREEFREWFERLFSTSKDAWRRITELEVDGDTVFVRVLLEFTLN

SEQ ID NO: 2253 - protein, 150 aa, synthetic construct
GQKHRVRLTHWFRFRGNRVTEVRVAIRPLTPSPLLLALGQDVAAQEAAMAALRAAAAGAPASLSEEQIRQFLRRFYEALDSGDADTAASLFHPGVTIHLWDGVTFTSREEFREWFERLFSTSKDAWREITRLEVDGDTVLVEVELTFTLN

SEQ ID NO: 2254 - protein, 150 aa, synthetic construct
GQKHEVRLAHYFRFRGNRVTEVRVAITPLTPSPLLEALGSDVAALEAEIEALEAADAGRPASLSEEQIRQFLRRFYEALDSGDADTAASLFHPGVTIHLWDGVTFTSREEFREWFERLFSTSKDAWREIEELRVDGDTVFVRVRLTFTLN

SEQ ID NO: 2255 - protein, 150 aa, synthetic construct
GQKHVVRLTHWFRFRGNRVTEVRVVIEPLTPSPLLEALGSDVAALRAEVAELRAAAAGAPASLSEEQIRQFLRRFYEALDSGDADTAASLFHPGVTIHLWDGVTFTSREEFREWFERLFSTSKDAWRHIEELEVDGDTVFVRVRLEFTLN

SEQ ID NO: 2256 - protein, 150 aa, synthetic construct
GQKHEVRLTHFFRFRGNRVTEVRVYIRPLTPSPLLEALGERVEELEEEARRLREEARGRPASLSEEQIRQFLRRFYEALDSGDADTAASLFHPGVTIHLWDGVTFTSREEFREWFERLFSTSKDAWREITRLEVDGDTVFVEVRLTFTLN

SEQ ID NO: 2257 - protein, 150 aa, synthetic construct
GQKHVVRLTHWFRFRGNRVTEVWVAIEVLTPSPLFLALGQDVAAQAAAVEARRAAAAGAPASLSEEQIRQFLRRFYEALDSGDADTAASLFHPGVTIHLWDGVTFTSREEFREWFERLFSTSKDAWREIERLEVDGDTVLVDVLLEFTLN

SEQ ID NO: 2258 - protein, 150 aa, synthetic construct
GQKHVVRLWHWFEFRGNRVTRVRVAIEVETPSPLFKALGQDVAALRAEMEALRAAAAGRPASLSEEQIRQFLRRFYEALDSGDADTAASLFHPGVTIHLWDGVTFTSREEFREWFERLFSTSKDAWREIEELEVDGDTVFVRVRLEFTLN

SEQ ID NO: 2259 - protein, 150 aa, synthetic construct
GQKHEVRLWHVFRFRGNRVTEVRVVIEVLTPSPLLEALGQRLEELLAEVEALRAAAAGAPASLSEEQIRQFLRRFYEALDSGDADTAASLFHPGVTIHLWDGVTFTSREEFREWFERLFSTSKDAWREIEELEVDGDTVFVRVRLTFTLN

SEQ ID NO: 2260 - protein, 151 aa, synthetic construct
GQKHIVVLVHTFRFRGNRVTEVRVRIIEVESEADLPAALAEALALADEILAAERARRGGGPPSISEEQIRQFLRRFYEALDSGDADTAASLFHPGVTIHLWDGVTFTSREEFREWFERLFSTSKDAWRRIERLEVDGDTVVVVVVLEFTLN

SEQ ID NO: 2261 - protein, 151 aa, synthetic construct
GQKHIVVLVHLFRFRGNRVTEVRVEIIEVESEEELPAALAEARARAEEILAAERARRGGGPPSISEEQIRQFLRRFYEALDSGDADTAASLFHPGVTIHLWDGVTFTSREEFREWFERLFSTSKDAWRHIESLTVEGDTVVVVVVLHFTLN

SEQ ID NO: 2262 - protein, 151 aa, synthetic construct
GQKHIVVLVHAFRFRGNRVTEVEVRIFEVESEADLPAALAEALAEAERILAEREAREGGGPPSVSEEQIRQFLRRFYEALDSGDADTAASLFHPGVTIHLWDGVTFTSREEFREWFERLFSTSKDAWREIVRLEVRGDTVVVVVVLHFTLN

SEQ ID NO: 2263 - protein, 151 aa, synthetic construct
GQKHIVVLVHTFRFRGNRVTHVEVRIIEVPDEAALPEKLAEARALAEEILAAERARRGGGPASISEEQIRQFLRRFYEALDSGDADTAASLFHPGVTIHLWDGVTFTSREEFREWFERLFSTSKDAWRRIETLTVEGDTVVVVVTLTFTLN

SEQ ID NO: 2264 - protein, 151 aa, synthetic construct
GQKHIVVLVHVFRFRGNRVTEVRVEIIEVESEAALPEALAKALALAEELLARLRAERGGGPPSVSEEQIRQFLRRFYEALDSGDADTAASLFHPGVTIHLWDGVTFTSREEFREWFERLFSTSKDAWRRIVRLEVEGDTVVVVVVLEFTLN

SEQ ID NO: 2265 - protein, 151 aa, synthetic construct
GQKHIVALVHVFRFRGNRVTEVRVRIFECPDEAALPEVLARARAAADEELAALRAEEGGGPPSVSEEQIRQFLRRFYEALDSGDADTAASLFHPGVTIHLWDGVTFTSREEFREWFERLFSTSKDAWRRIESLRVEGDTVVVVVVLEFTLN

SEQ ID NO: 2266 - protein, 151 aa, synthetic construct
GQKHIVVLVHTFRFRGNRVTEVEVEIIEVESEEKLPEALAEARALADRILAARLAERGGGPPSLSEEQIRQFLRRFYEALDSGDADTAASLFHPGVTIHLWDGVTFTSREEFREWFERLFSTSKDAWREIESLRVEGDTVVVVVVLEFTLN

SEQ ID NO: 2267 - protein, 151 aa, synthetic construct
GQKHIVALVHVFRFRGNRVTEVEVRIFEAPDEAALPEVLAQARAEAEALLAALRAERGGGPPSVSEEQIRQFLRRFYEALDSGDADTAASLFHPGVTIHLWDGVTFTSREEFREWFERLFSTSKDAWRHIEELRVDGDTVVVVVVLEFTLN

SEQ ID NO: 2268 - protein, 151 aa, synthetic construct
GQKHIVVLVHTFRFRGNRVTEVEVEIFEVPSEEDLPAALARARARADEILAALLAERGGGPPSISEEQIRQFLRRFYEALDSGDADTAASLFHPGVTIHLWDGVTFTSREEFREWFERLFSTSKDAWRRIEELRVEGDTVVVVVVLHFTLN

SEQ ID NO: 2269 - protein, 151 aa, synthetic construct
GQKHIVALVHSFRFRGNRVTEVRVEIFECASEADLPAVLARALARAEEILAAARAERGGGPPSISEEQIRQFLRRFYEALDSGDADTAASLFHPGVTIHLWDGVTFTSREEFREWFERLFSTSKDAWRRIVSLRVEGDTVVVVVVLTFTLN

SEQ ID NO: 2270 - protein, 151 aa, synthetic construct
GQKHIVVLVHTFVFRGNRVTEVEVEIFEAASEEDLPAVLAEAEARADEILAAARARRGGGPPSISEEQIRQFLRRFYEALDSGDADTAASLFHPGVTIHLWDGVTFTSREEFREWFERLFSTSKDAWRRIVRLEVEGDTVVVVVVLEFTLN

SEQ ID NO: 2271 - protein, 151 aa, synthetic construct
GQKHIVVLVHLFRFRGNRVTEVRVEIFEVPSEEALPEVLARARARAEEILAAELARRGGGPPSISEEQIRQFLRRFYEALDSGDADTAASLFHPGVTIHLWDGVTFTSREEFREWFERLFSTSKDAWRRIEELRVEGDTVVVVVVLEFTLN

SEQ ID NO: 2272 - protein, 151 aa, synthetic construct
GQKHIVVLVHVFRFRGNRVTEVRVEIFEVPSEEALPEVLARAEALADELLAAELARRGGGPPSISEEQIRQFLRRFYEALDSGDADTAASLFHPGVTIHLWDGVTFTSREEFREWFERLFSTSKDAWRRIERLRVEGDTVVVVVTLEFTLN

SEQ ID NO: 2273 - protein, 151 aa, synthetic construct
GQKHYVVLVHEFVFRGNRVTEVRVRIFEAASEADLPAVLAEARAEAREILARRRAERGGGPPSISEEQIRQFLRRFYEALDSGDADTAASLFHPGVTIHLWDGVTFTSREEFREWFERLFSTSKDAWRRIEELEVEGDTVVVVVVLEFTLN

SEQ ID NO: 2274 - protein, 151 aa, synthetic construct
GQKHIVVLVHTFRFRGNRVTHVEVDIFEAASEADLPEVLAQARALAAERLAAERARRGGGPPSLSEEQIRQFLRRFYEALDSGDADTAASLFHPGVTIHLWDGVTFTSREEFREWFERLFSTSKDAWRRIEELRVEGDTVVVVVVLEFTLN

SEQ ID NO: 2275 - protein, 151 aa, synthetic construct
GQKHIVVLVHLFRFRGNRVTEVRVEIFEVASEADLPAVLAEALARADELLAAELARRGGGPPSLSEEQIRQFLRRFYEALDSGDADTAASLFHPGVTIHLWDGVTFTSREEFREWFERLFSTSKDAWRRIERLEVRGDTVVVVVTLTFTLN

SEQ ID NO: 2276 - protein, 151 aa, synthetic construct
GQKHIVVLVHTFVFRGNRVTEVEVEIFEAPSEEAVPEVEARARARAERILAARRAERGGGPPSVSEEQIRQFLRRFYEALDSGDADTAASLFHPGVTIHLWDGVTFTSREEFREWFERLFSTSKDAWREILELRVEGDTVVVVVRLTFTLN

SEQ ID NO: 2277 - protein, 151 aa, synthetic construct
GQKHIVVLVHVFEFRGNRVTRVEVEIFEAESEEALPEVLAEARARAEEVLAARRAERGGGPPSLSEEQIRQFLRRFYEALDSGDADTAASLFHPGVTIHLWDGVTFTSREEFREWFERLFSTSKDAWREIVDLRVEGDTVVVVVVLHFTLN

SEQ ID NO: 2278 - protein, 151 aa, synthetic construct
GQKHIVVLVHSFRFRGNRVTEVRVEIIEVESEAALPEALARALALADEILAAAEAERGGGPPSVSEEQIRQFLRRFYEALDSGDADTAASLFHPGVTIHLWDGVTFTSREEFREWFERLFSTSKDAWREIVRLEVRGDTVVVVVVLTFTLN

SEQ ID NO: 2279 - protein, 151 aa, synthetic construct
GQKHIVVLVHTFRFRGNRVTHVEVEIIEVPSEAALPEALARAEALAAARLAEALAERGGGPPSISEEQIRQFLRRFYEALDSGDADTAASLFHPGVTIHLWDGVTFTSREEFREWFERLFSTSKDAWREIVSLRVEGDTVVVVVVLHFTLN

SEQ ID NO: 2280 - protein, 152 aa, synthetic construct
GQKHTVVLVHLFRFRGNRVTEVRVEIIPVPSEERLPEAIARARELGERLLAEELARRGAGGPPEISEEQIRQFLRRFYEALDSGDADTAASLFHPGVTIHLWDGVTFTSREEFREWFERLFSTSKDAWREIVELRVEGDTVVVVVVLTFTLN

SEQ ID NO: 2281 - protein, 152 aa, synthetic construct
GQKHTVVLVHLFRFRGNRVTEVEVRILPVPSEEELPEAVARARALARALLAERLAERGAGGPPEISEEQIRQFLRRFYEALDSGDADTAASLFHPGVTIHLWDGVTFTSREEFREWFERLFSTSKDAWREIVELEVRGDTVAVVVVLHFTLN

SEQ ID NO: 2282 - protein, 152 aa, synthetic construct
GQKHTVVLVHLFRFRGNRVTEVEVRIFPVPSEEELPAAVAKARALARELLARTLAERGAGGPAEISEEQIRQFLRRFYEALDSGDADTAASLFHPGVTIHLWDGVTFTSREEFREWFERLFSTSKDAWRRIVELEVRGDTVVVVVVLDFTLN

SEQ ID NO: 2283 - protein, 152 aa, synthetic construct
GQKHTVVLVHLFRFRGNRVTEVEVRILPVASPEELPAAVAEARELADRLLAERLAEEAAGGPPTISEEQIRQFLRRFYEALDSGDADTAASLFHPGVTIHLWDGVTFTSREEFREWFERLFSTSKDAWRRIERLEVRGDTVAVVVVLDFTLN

SEQ ID NO: 2284 - protein, 152 aa, synthetic construct
GQKHLVVLVHLFRFRGNRVTEVEVRIFPVESEEELPAALARAEELGRELLERTLAEEGAGGPPEISEEQIRQFLRRFYEALDSGDADTAASLFHPGVTIHLWDGVTFTSREEFREWFERLFSTSKDAWREIERLEVRGDTVVVVVRLRFTLN

SEQ ID NO: 2285 - protein, 152 aa, synthetic construct
GQKHYVVLVHLFRFRGNRVTEVRVEILPVPSEAELPARIAEARALGDRLLAETLARRGAGGPPTISEEQIRQFLRRFYEALDSGDADTAASLFHPGVTIHLWDGVTFTSREEFREWFERLFSTSKDAWREIVELRVEGDTVVVVVVLRFTLN

SEQ ID NO: 2286 - protein, 152 aa, synthetic construct
GQKHTVVLVHLFRFRGNRVTEVEVEIFPVPSEAELPAAVARARARADELLATRLAERGAGGPPEISEEQIRQFLRRFYEALDSGDADTAASLFHPGVTIHLWDGVTFTSREEFREWFERLFSTSKDAWRRIEELRVEGDTVVVVVVLDFTLN

SEQ ID NO: 2287 - protein, 152 aa, synthetic construct
GQKHTVVLVHLFRFRGNRVTEVRVEIFPVPSEAELPAAIARARELGDALLAETLAERGAGAPPEISEEQIRQFLRRFYEALDSGDADTAASLFHPGVTIHLWDGVTFTSREEFREWFERLFSTSKDAWREIVDLRVRGDTVVVVVKLTFTLN

SEQ ID NO: 2288 - protein, 152 aa, synthetic construct
GQKHRVVLVHLFRFRGNRVTEVEVRILPVPSEADLPAAIAEAEALARELLARTLAERGAGAPPTISEEQIRQFLRRFYEALDSGDADTAASLFHPGVTIHLWDGVTFTSREEFREWFERLFSTSKDAWRRIVSLRVEGDTVAVVVVLDFTLN

SEQ ID NO: 2289 - protein, 152 aa, synthetic construct
GQKHIVVLVHLFVFRGNRVTEVRVEIFPVEREEELEEAIARARELAERLLAETLARRGAGGAPTISEEQIRQFLRRFYEALDSGDADTAASLFHPGVTIHLWDGVTFTSREEFREWFERLFSTSKDAWREIVELRVEGDTVVVVVRLTFTLN

SEQ ID NO: 2290 - protein, 152 aa, synthetic construct
GQKHTVVLVHLFRFRGNRVTEVEVRIFPVPSEEELPAAVARARELADRLLAERLAEEGAGAPPTISEEQIRQFLRRFYEALDSGDADTAASLFHPGVTIHLWDGVTFTSREEFREWFERLFSTSKDAWRRIEELRVEGDTVVVVVVLEFTLN

SEQ ID NO: 2291 - protein, 152 aa, synthetic construct
GQKHTVVLVHLFEFRGNRVTRVEVRILPVPSEEELPEAVARARALGDELLARTLAERGAGAPAEISEEQIRQFLRRFYEALDSGDADTAASLFHPGVTIHLWDGVTFTSREEFREWFERLFSTSKDAWREIVELRVRGDTVVVVVVLHFTLN

SEQ ID NO: 2292 - protein, 152 aa, synthetic construct
GQKHTVVLVHLFRFRGNRVTEVEVRIFPVPREEELPAAIARARAEADRLLAETLARRGAGAPPTISEEQIRQFLRRFYEALDSGDADTAASLFHPGVTIHLWDGVTFTSREEFREWFERLFSTSKDAWRRIVELRVEGDTVAVVVVLEFTLN

SEQ ID NO: 2293 - protein, 152 aa, synthetic construct
GQKHLVVLVHLFRFRGNRVTEVEVRIFPVESEEELPAALARARELGDALLAETLAERGAGAPASISEEQIRQFLRRFYEALDSGDADTAASLFHPGVTIHLWDGVTFTSREEFREWFERLFSTSKDAWRRIHELRVEGDTVVVVVELRFTLN

SEQ ID NO: 2294 - protein, 152 aa, synthetic construct
GQKHVVVLVHLFVFRGNRVTEVRVRILPVPSEAELDAALAEAERLADALLAETLARRGAGAPPTISEEQIRQFLRRFYEALDSGDADTAASLFHPGVTIHLWDGVTFTSREEFREWFERLFSTSKDAWREIERLEVRGDTVVVVVRLTFTLN

SEQ ID NO: 2295 - protein, 152 aa, synthetic construct
GQKHTVVLVHLFVFRGNRVTEVEVRIFPVESEEELPAAIARAREEARRLLAERLARRGAGGAPTISEEQIRQFLRRFYEALDSGDADTAASLFHPGVTIHLWDGVTFTSREEFREWFERLFSTSKDAWREIVELRVEGDTVVVVVVLHFTLN

SEQ ID NO: 2296 - protein, 152 aa, synthetic construct
GQKHIVALVHLFRFRGNRVTEVEVRIFPVPSEEELPRVLEEARELGRRLLEETLARRGAGGPPTISEEQIRQFLRRFYEALDSGDADTAASLFHPGVTIHLWDGVTFTSREEFREWFERLFSTSKDAWRRIEELEVRGDTVVVVVTLEFTLN

SEQ ID NO: 2297 - protein, 152 aa, synthetic construct
GQKHIVVLVHLFEFRGNRVTRVEVRIIPVESEEELEAAIARAEELAERLLAERLAELGEGGPPTISEEQIRQFLRRFYEALDSGDADTAASLFHPGVTIHLWDGVTFTSREEFREWFERLFSTSKDAWREIVSLRVRGDTVVVVVVLHFTLN

SEQ ID NO: 2298 - protein, 152 aa, synthetic construct
GQKHYVVLVHLFVFRGNRVTEVEVRILPVASPEELPAAIAEAEALGERLLAERLAARGAGAPPTISEEQIRQFLRRFYEALDSGDADTAASLFHPGVTIHLWDGVTFTSREEFREWFERLFSTSKDAWRRIHSLRVEGDTVVVVVTLEFTLN

SEQ ID NO: 2299 - protein, 152 aa, synthetic construct
GQKHTVVLVHLFRFRGNRVTEVRVEIIPVPSEEELPAAVARARELGDRLLAETLAERGAGAPPEISEEQIRQFLRRFYEALDSGDADTAASLFHPGVTIHLWDGVTFTSREEFREWFERLFSTSKDAWRRIEELRVRGDTVVVVVVLDFTLN

SEQ ID NO: 2300 - protein, 153 aa, synthetic construct
GQKHRVVLVHRFWFRGNRVTEVEVRIFECPSTEEEDARALAEEIWAREEAEFAAEYAARSGGPASISEEQIRQFLRRFYEALDSGDADTAASLFHPGVTIHLWDGVTFTSREEFREWFERLFSTSKDAWREILRLDVRGDTVLVVVVLDFTLN

SEQ ID NO: 2301 - protein, 153 aa, synthetic construct
GQKHRVVLVHTFRFRGNRVTEVEVRIFECPTTDLADAEALAEEVWERESARFAERYAAEAGGPAEISEEQIRQFLRRFYEALDSGDADTAASLFHPGVTIHLWDGVTFTSREEFREWFERLFSTSKDAWRRILRLEVRGDTVLVVVVLEFTLN

SEQ ID NO: 2302 - protein, 153 aa, synthetic construct
GQKHRVVLVHRFRFRGNRVTEVEVEIYECPSTDPADARALAEEIWARRRAEFAAEYAAESGGPASISEEQIRQFLRRFYEALDSGDADTAASLFHPGVTIHLWDGVTFTSREEFREWFERLFSTSKDAWREILRLEVRGDTVLVVVVLDFTLN

SEQ ID NO: 2303 - protein, 153 aa, synthetic construct
GQKHRVVLVHRFRFRGNRVTEVRVEIYECPSTDPADAEALAARLWAEEEARFAEEYAAEAGGPAEISEEQIRQFLRRFYEALDSGDADTAASLFHPGVTIHLWDGVTFTSREEFREWFERLFSTSKDAWRRILRLEVRGDTVLVVVVLEFTLN

SEQ ID NO: 2304 - protein, 153 aa, synthetic construct
GQKHRVVLVHRFVFRGNRVTEVRVRIYECPSTDEADALALAERVWEEERAEFDREYAARSGGPATISEEQIRQFLRRFYEALDSGDADTAASLFHPGVTIHLWDGVTFTSREEFREWFERLFSTSKDAWRRIVRLEVRGDTVLVVVVLDFTLN

SEQ ID NO: 2305 - protein, 153 aa, synthetic construct
GQKHRVVLVHRFVFRGNRVTEVRVRIYDCPTTELEDARALAARIWEEESAAFAEEYAARSGGPASISEEQIRQFLRRFYEALDSGDADTAASLFHPGVTIHLWDGVTFTSREEFREWFERLFSTSKDAWREILRLEVRGDTVLVVVVLDFTLN

SEQ ID NO: 2306 - protein, 153 aa, synthetic construct
GQKHRVVLVHTFRFRGNRVTEVRVEIYECPSTDLADARALAERVWAEARERFAAEYAAEAGGPASISEEQIRQFLRRFYEALDSGDADTAASLFHPGVTIHLWDGVTFTSREEFREWFERLFSTSKDAWREILRLEVRGDTVLVVVVLDFTLN

SEQ ID NO: 2307 - protein, 153 aa, synthetic construct
GQKHRVVLVHRFRFRGNRVTEVEVRIYECPSTDLATAEALAAEIWAEERAAFDEEYAARAGGPAEISEEQIRQFLRRFYEALDSGDADTAASLFHPGVTIHLWDGVTFTSREEFREWFERLFSTSKDAWRRILELEVRGDTVLVVVVLEFTLN

SEQ ID NO: 2308 - protein, 153 aa, synthetic construct
GQKHRVVLVHRFRFRGNRVTEVDVEIYEVPTTDEADALALAEEVWERAKAEFDAEYAARSGGPASISEEQIRQFLRRFYEALDSGDADTAASLFHPGVTIHLWDGVTFTSREEFREWFERLFSTSKDAWRRIVRLEVRGDTVLVVVVLDFTLN

SEQ ID NO: 2309 - protein, 153 aa, synthetic construct
GQKHRVVLVHRFRFRGNRVTEVEVRIYECPSTAREDAEALAAEIWARARAEFDEAYAAESGGPASISEEQIRQFLRRFYEALDSGDADTAASLFHPGVTIHLWDGVTFTSREEFREWFERLFSTSKDAWREILRLEVRGDTVLVVVILEFTLN

SEQ ID NO: 2310 - protein, 153 aa, synthetic construct
GQKHRVVLVHRFRFRGNRVTEVEVRIAECPTTDPADARALAEELWARERAEFDARYAAEAGGPAEISEEQIRQFLRRFYEALDSGDADTAASLFHPGVTIHLWDGVTFTSREEFREWFERLFSTSKDAWREILRLEVRGDTVLVVVVLDFTLN

SEQ ID NO: 2311 - protein, 153 aa, synthetic construct
GQKHRVVLVHRFRFRGNRVTEVEVRIYECPTTDLADAEALAERVWEEEEAAFAERYAAEAGGPAEISEEQIRQFLRRFYEALDSGDADTAASLFHPGVTIHLWDGVTFTSREEFREWFERLFSTSKDAWRRILRLDVRGDTVLVVVVLEFTLN

SEQ ID NO: 2312 - protein, 153 aa, synthetic construct
GQKHRVVLVHRFEFRGNRVTEVRVEIYECPTTEREDAVALAEEVWERERARFAEEYAARAGGPASISEEQIRQFLRRFYEALDSGDADTAASLFHPGVTIHLWDGVTFTSREEFREWFERLFSTSKDAWREILRLEVRGDTVLVVVVLDFTLN

SEQ ID NO: 2313 - protein, 153 aa, synthetic construct
GQKHRVVLVHRFRFRGNRVTEVEVRIYECPSTDRADAVALAEEIWAREEAEFAAEYAARAGGPASISEEQIRQFLRRFYEALDSGDADTAASLFHPGVTIHLWDGVTFTSREEFREWFERLFSTSKDAWREILRLEVRGDTVLVVVVLEFTLN

SEQ ID NO: 2314 - protein, 153 aa, synthetic construct
GQKHRVVLVHRFVFRGNRVTEVEVRIFECPSTDLEDARALAREIWERERAEFDARYAEESGGPATISEEQIRQFLRRFYEALDSGDADTAASLFHPGVTIHLWDGVTFTSREEFREWFERLFSTSKDAWREILELEVRGDTVLVVVVLEFTLN

SEQ ID NO: 2315 - protein, 153 aa, synthetic construct
GQKHRVVLVHRFRFRGNRVTEVEVRIYECPSVDRADAEALAERLWAEELARFEEEYAAESGGPASISEEQIRQFLRRFYEALDSGDADTAASLFHPGVTIHLWDGVTFTSREEFREWFERLFSTSKDAWREILRLEVRGDTVLVVVVLTFTLN

SEQ ID NO: 2316 - protein, 153 aa, synthetic construct
GQKHRVVLVHEFVFRGNRVTEVRVRIYECPSTDLADARALAEEVWAEEEARFAERYAARSGGPATISEEQIRQFLRRFYEALDSGDADTAASLFHPGVTIHLWDGVTFTSREEFREWFERLFSTSKDAWREILRLEVRGDTVLVVVVLDFTLN

SEQ ID NO: 2317 - protein, 153 aa, synthetic construct
GQKHRVVLVHRFRFRGNRVTEVRVEIRECPTTDEADARALAEELWAEEAERFDAEYAAESGGPAEISEEQIRQFLRRFYEALDSGDADTAASLFHPGVTIHLWDGVTFTSREEFREWFERLFSTSKDAWREILRLDVRGDTVLVVVVLDFTLN

SEQ ID NO: 2318 - protein, 153 aa, synthetic construct
GQKHRVVLVHTFRFRGNRVTEVEVRIYDCPTTEEEDARALAERVWAEAREEFAARYAEESGGPASISEEQIRQFLRRFYEALDSGDADTAASLFHPGVTIHLWDGVTFTSREEFREWFERLFSTSKDAWREILRLEVRGDTVLVVVVLDFTLN

SEQ ID NO: 2319 - protein, 153 aa, synthetic construct
GQKHRVVLVHRFRFRGNRVTEVEVEIHECPTTDLADAEALAAEVWARTEAEFAAEYAARAGGPATISEEQIRQFLRRFYEALDSGDADTAASLFHPGVTIHLWDGVTFTSREEFREWFERLFSTSKDAWRRILRLEVRGDTVLVVVVLDFTLN

SEQ ID NO: 2320 - protein, 154 aa, synthetic construct
GQKHVVRLVHLFRFRGNRVTEVRVEILPLVPSEGLEALLKELSARNRARVAAIEAEFAAAAGAPASVSEEQIRQFLRRFYEALDSGDADTAASLFHPGVTIHLWDGVTFTSREEFREWFERLFSTSKDAWRRILALRVEGDTVLVEVELEFTLN

SEQ ID NO: 2321 - protein, 154 aa, synthetic construct
GQKHVVRLVHLFRFRGNRVTEVRVEILPEEPSEGCAACLAEREAEQRARVEEIRAEFEAVRGRPASISEEQIRQFLRRFYEALDSGDADTAASLFHPGVTIHLWDGVTFTSREEFREWFERLFSTSKDAWRHIERLEVVGDTVLVEVRLEFTLN

SEQ ID NO: 2322 - protein, 154 aa, synthetic construct
GQKHRVRLVHLFEFRGNRVTRVEVEILPLEPSEALEALLAELAARNRARVAEIDARVAAVAGRPASLSEEQIRQFLRRFYEALDSGDADTAASLFHPGVTIHLWDGVTFTSREEFREWFERLFSTSKDAWRRILSLEVVGDTVRVEVLLEFTLN

SEQ ID NO: 2323 - protein, 154 aa, synthetic construct
GQKHVVRLAHLFRFRGNRVTEVRVVILPEEPSEGLAALLSELQAEQEARLAELDAEFAAVRGRPASISEEQIRQFLRRFYEALDSGDADTAASLFHPGVTIHLWDGVTFTSREEFREWFERLFSTSKDAWRHIERLRVEGDTVLVEVTLEFTLN

SEQ ID NO: 2324 - protein, 154 aa, synthetic construct
GQKHRVRLVHRFRFRGNRVTHVEVVILPVEPSEGLAALLAEREAENRARVERLRAEFAAVAGRPASISEEQIRQFLRRFYEALDSGDADTAASLFHPGVTIHLWDGVTFTSREEFREWFERLFSTSKDAWRRILRLEVVGDTVLVEVELEFTLN

SEQ ID NO: 2325 - protein, 154 aa, synthetic construct
GQKHVVELTHLFRFRGNRVTHVEVVIRPLKPSEACAACLAELQAENEAREAEIEAEMAAVAGRPASISEEQIRQFLRRFYEALDSGDADTAASLFHPGVTIHLWDGVTFTSREEFREWFERLFSTSKDAWRHIESLRVEGDTVLVRVRLEFTLN

SEQ ID NO: 2326 - protein, 154 aa, synthetic construct
GQKHVVRLVHLFRFRGNRVTEVEVVILPEEPSEALEALLKELEAANRARVEELEARVAAVAGAPASVSEEQIRQFLRRFYEALDSGDADTAASLFHPGVTIHLWDGVTFTSREEFREWFERLFSTSKDAWRRILRLRVEGDTVLVEVRLEFTLN

SEQ ID NO: 2327 - protein, 154 aa, synthetic construct
GQKHVVRLLHLFRFRGNRVTEVRVVIRPVEPSEGLQALLAELQAENEARAAEIDAEFAAVAGRPASISEEQIRQFLRRFYEALDSGDADTAASLFHPGVTIHLWDGVTFTSREEFREWFERLFSTSKDAWRRIERLEVVGDTVRVEVTLEFTLN

SEQ ID NO: 2328 - protein, 154 aa, synthetic construct
GQKHVVELVHRFRFRGNRVTEVEVVILPVEPSEALEALLAELQAENEARVAEIEAEMAAVAGAPASISEEQIRQFLRRFYEALDSGDADTAASLFHPGVTIHLWDGVTFTSREEFREWFERLFSTSKDAWRHIESLEVVGDTVLVRVRLEFTLN

SEQ ID NO: 2329 - protein, 154 aa, synthetic construct
GQKHRVRLVHLFRFRGNRVTEVEVVILPEEPAEGLAALLAELAAEQRARVEAIRARMAAVRGRPASISEEQIRQFLRRFYEALDSGDADTAASLFHPGVTIHLWDGVTFTSREEFREWFERLFSTSKDAWRHIESLEVEGDTVLVEVTLEFTLN

SEQ ID NO: 2330 - protein, 154 aa, synthetic construct
GQKHVVRLLHRFRFRGNRVTEVEVVIRPEVPSEPLAALLAELEEENERRAEEIEAEFEAVRGRPASISEEQIRQFLRRFYEALDSGDADTAASLFHPGVTIHLWDGVTFTSREEFREWFERLFSTSKDAWREILRLEVEGDTVLVEVRLEFTLN

SEQ ID NO: 2331 - protein, 154 aa, synthetic construct
GQKHVVRLVHLFRFRGNRVTEVEVEILSEVPSEACAACLEELEAEQRARVEEIRARVAAVAGRPASLSEEQIRQFLRRFYEALDSGDADTAASLFHPGVTIHLWDGVTFTSREEFREWFERLFSTSKDAWRRIERLEVVGDTVLVEVTLTFTLN

SEQ ID NO: 2332 - protein, 154 aa, synthetic construct
GQKHVVELVHLFRFRGNRVTEVRVAILPVVPSEACAACLAELAARNRAEIAAIDAEVAAVAGRPASISEEQIRQFLRRFYEALDSGDADTAASLFHPGVTIHLWDGVTFTSREEFREWFERLFSTSKDAWREILSLEVVGDTVRVVVRLEFTLN

SEQ ID NO: 2333 - protein, 154 aa, synthetic construct
GQKHRVRLTHLFRFRGNRVTEVEVVIEPIVPSEGCEACLKENVEKNKARREELEARVAAVAGRPASISEEQIRQFLRRFYEALDSGDADTAASLFHPGVTIHLWDGVTFTSREEFREWFERLFSTSKDAWRRILELRVVGDTVLVEVELEFTLN

SEQ ID NO: 2334 - protein, 154 aa, synthetic construct
GQKHVVRLVHLFRFRGNRVTEVRVVILPEVPSEPLEALLKEREAENRAEVAAIEAEVAAARGAPASISEEQIRQFLRRFYEALDSGDADTAASLFHPGVTIHLWDGVTFTSREEFREWFERLFSTSKDAWREILRLEVVGDTVRVEVRLEFTLN

SEQ ID NO: 2335 - protein, 154 aa, synthetic construct
GQKHVVRLTHLFRFRGNRVTEVEVVIEPLVPSEALDALLSERQAENAARREEIRARMEAVRGRPASISEEQIRQFLRRFYEALDSGDADTAASLFHPGVTIHLWDGVTFTSREEFREWFERLFSTSKDAWRRILRLEVEGDTVLVEVLLEFTLN

SEQ ID NO: 2336 - protein, 154 aa, synthetic construct
GQKHVVRLTHLFEFRGNRVTRVEVVIEPVVPSEACEACLKELQAEQAARREEIAARVAAVAGRPASISEEQIRQFLRRFYEALDSGDADTAASLFHPGVTIHLWDGVTFTSREEFREWFERLFSTSKDAWRRILRLEVVGDTVLVEVELEFTLN

SEQ ID NO: 2337 - protein, 154 aa, synthetic construct
GQKHRVRLVHLFRFRGNRVTEVRVEILPLEPSEACEACLATQQAANEARVAEIDAEVAAAAGAPASISEEQIRQFLRRFYEALDSGDADTAASLFHPGVTIHLWDGVTFTSREEFREWFERLFSTSKDAWRRILRLEVVGDTVRVEVELDFTLN

SEQ ID NO: 2338 - protein, 154 aa, synthetic construct
GQKHRVLLHHLFEFRGNRVTEVRVEILPLEPSEELEKLLAELQAENRARVEELRARFAAVRGRPASISEEQIRQFLRRFYEALDSGDADTAASLFHPGVTIHLWDGVTFTSREEFREWFERLFSTSKDAWRRILRLEVVGDTVLVEVLLEFTLN

SEQ ID NO: 2339 - protein, 154 aa, synthetic construct
GQKHVVRLTHLFRFRGNRVTEVRVVIEPVVPSEGCEACLKELQAENAARRAEIDAEMAAVAGSPASISEEQIRQFLRRFYEALDSGDADTAASLFHPGVTIHLWDGVTFTSREEFREWFERLFSTSKDAWRHIESLEVVGDTVRVVVTLTFTLN

SEQ ID NO: 2340 - protein, 155 aa, synthetic construct
GQKHRVRLLHVFRFRGNRVTEVEVLIRPLTPNPFVVSLLAGRAGAAAEEEEAALLAALAAETGGPASISEEQIRQFLRRFYEALDSGDADTAASLFHPGVTIHLWDGVTFTSREEFREWFERLFSTSKDAWRRITRLEVDGDTVVVEVELDFTLN

SEQ ID NO: 2341 - protein, 155 aa, synthetic construct
GQKHRVRLLHVFRFRGNRVTEVEVLIEPLTPNPFVVSLLAGRGRERAEAERRELLARLRLETGGPASISEEQIRQFLRRFYEALDSGDADTAASLFHPGVTIHLWDGVTFTSREEFREWFERLFSTSKDAWRRIERLEVDGDTVVVEVVLEFTLN

SEQ ID NO: 2342 - protein, 155 aa, synthetic construct
GQKHTVRLLHVFRFRGNRVTEVRVLIRPLTPNPAVVAALAGAAGAEAEAREAALRAALAAATGGPASISEEQIRQFLRRFYEALDSGDADTAASLFHPGVTIHLWDGVTFTSREEFREWFERLFSTSKDAWRRIERLEVDGDTVVVEVVLEFTLN

SEQ ID NO: 2343 - protein, 155 aa, synthetic construct
GQKHRVRLLHVFRFRGNRVTEVRVLIEPLTPNPFVVELLAGRARERAEAEREALLARLRAETGGPPSISEEQIRQFLRRFYEALDSGDADTAASLFHPGVTIHLWDGVTFTSREEFREWFERLFSTSKDAWRHITRLEVDGDTVVVEVELEFTLN

SEQ ID NO: 2344 - protein, 155 aa, synthetic construct
GQKHVVELLHIFRFRGNRVTEVRVIIRPITPNPRVVAALAGRAGEKADEEIAELLAALERETGGPASISEEQIRQFLRRFYEALDSGDADTAASLFHPGVTIHLWDGVTFTSREEFREWFERLFSTSKDAWREIEELRVDGDTVVVRVRLTFTLN

SEQ ID NO: 2345 - protein, 155 aa, synthetic construct
GQKHRVRLLHVFRFRGNRVTEVRVIIRPLTPNPRVVEALAGRAREEAEREEEELLAALRRETGGPASISEEQIRQFLRRFYEALDSGDADTAASLFHPGVTIHLWDGVTFTSREEFREWFERLFSTSKDAWRRIVRLEVVGDTVVVEVELEFTLN

SEQ ID NO: 2346 - protein, 155 aa, synthetic construct
GQKHTVRLLHVFRFRGNRVTEVRVIIRPLTPNPFIVSLLAGRGGEAAEAEEAALRAALRAETGGPASISEEQIRQFLRRFYEALDSGDADTAASLFHPGVTIHLWDGVTFTSREEFREWFERLFSTSKDAWRHITRLEVDGDTVVVEVVLEFTLN

SEQ ID NO: 2347 - protein, 155 aa, synthetic construct
GQKHVVELLHVFRFRGNRVTEVRVLIRPLTPNPRVVSLLAGRGGAAAEAEEAALLAALDAETGGPASISEEQIRQFLRRFYEALDSGDADTAASLFHPGVTIHLWDGVTFTSREEFREWFERLFSTSKDAWRHIEELRVDGDTVVVRVRLEFTLN

SEQ ID NO: 2348 - protein, 155 aa, synthetic construct
GQKHTVELLHVFRFRGNRVTEVEVLIVPLTPNPFVVSLLAGRAREEALAELEARLARLDAETGGPASISEEQIRQFLRRFYEALDSGDADTAASLFHPGVTIHLWDGVTFTSREEFREWFERLFSTSKDAWREITELRVDGDTVVVRVRLTFTLN

SEQ ID NO: 2349 - protein, 155 aa, synthetic construct
GQKHRVRLLHVFRFRGNRVTEVRVLIIPLTPNPFVVELLKGRAREEAEAEAAALRARLAAETGGPAEISEEQIRQFLRRFYEALDSGDADTAASLFHPGVTIHLWDGVTFTSREEFREWFERLFSTSKDAWRHIVALEVDGDTVVVEVELEFTLN

SEQ ID NO: 2350 - protein, 155 aa, synthetic construct
GQKHTVRLLHVFRFRGNRVTEVEVLIRPETPNPFVVSLLAGRGGAAAEAEEAALLAALRAATGGPASISEEQIRQFLRRFYEALDSGDADTAASLFHPGVTIHLWDGVTFTSREEFREWFERLFSTSKDAWREIERLEVDGDTVVVHVRLEFTLN

SEQ ID NO: 2351 - protein, 155 aa, synthetic construct
GQKHEVRLLHVFRFRGNRVTEVRVLIRPLTPNPAVVAALAGRAGERAEAEEAALLAALAAETGGPASISEEQIRQFLRRFYEALDSGDADTAASLFHPGVTIHLWDGVTFTSREEFREWFERLFSTSKDAWREIERLEVRGDTVVVEVRLTFTLN

SEQ ID NO: 2352 - protein, 155 aa, synthetic construct
GQKHRVRLLHVFRFRGNRVTEVRVIIIPETPNPFVVELLAGRGAEAARAEEEALLAALEAETGGPAEISEEQIRQFLRRFYEALDSGDADTAASLFHPGVTIHLWDGVTFTSREEFREWFERLFSTSKDAWRRIEELRVDGDTVVVRVVLEFTLN

SEQ ID NO: 2353 - protein, 155 aa, synthetic construct
GQKHVVELEHVFHFRGNRVTEVEVLIRPVTPHPAVVAALAGRGREEAEARLAELRARLAAETGGPATISEEQIRQFLRRFYEALDSGDADTAASLFHPGVTIHLWDGVTFTSREEFREWFERLFSTSKDAWREITELEVVGDTVRVRVRLTFTLN

SEQ ID NO: 2354 - protein, 155 aa, synthetic construct
GQKHRVRLLHVFRFRGNRVTEVRVIIRPLTPNPRVVAALAGRGREAAEAEEAELLAALRARTGGPASISEEQIRQFLRRFYEALDSGDADTAASLFHPGVTIHLWDGVTFTSREEFREWFERLFSTSKDAWRRIERLEVDGDTVVVEVTLEFTLN

SEQ ID NO: 2355 - protein, 155 aa, synthetic construct
GQKHEVELLHVFRFRGNRVTEVRVLIIPLTPNPFVVALLAGRARERAEAERERLLAALRAETGGPPSISEEQIRQFLRRFYEALDSGDADTAASLFHPGVTIHLWDGVTFTSREEFREWFERLFSTSKDAWREIVELEVDGDTVVVRVRLTFTLN

SEQ ID NO: 2356 - protein, 155 aa, synthetic construct
GQKHRVELLHIFRFRGNRVTEVEVLIRPLTPNPTVVAALAGRAGAAAEALEAERLAALAAETGGPAEISEEQIRQFLRRFYEALDSGDADTAASLFHPGVTIHLWDGVTFTSREEFREWFERLFSTSKDAWRRITRLEVDGDTVVVHVELDFTLN

SEQ ID NO: 2357 - protein, 155 aa, synthetic construct
GQKHRVRLLHVFRFRGNRVTEVRVLIEPVTPNPFVVSLLAGRAGAEAEAERRELLAALEAATGGPASISEEQIRQFLRRFYEALDSGDADTAASLFHPGVTIHLWDGVTFTSREEFREWFERLFSTSKDAWRRIVRLEVDGDTVVVEVELDFTLN

SEQ ID NO: 2358 - protein, 155 aa, synthetic construct
GQKHRVRLLHLFRFRGNRVTEVRVLIRPLTPNPAVVAALAGRAAEAAEAEEAALLAALAAETGGPASISEEQIRQFLRRFYEALDSGDADTAASLFHPGVTIHLWDGVTFTSREEFREWFERLFSTSKDAWRRITRLRVDGDTVAVEVELDFTLN

SEQ ID NO: 2359 - protein, 155 aa, synthetic construct
GQKHTVRLLHVFRFRGNRVTEVEVLIRPLTENPFVVSLLAGRAREAAEAEEEALLAALRAATGGPAEISEEQIRQFLRRFYEALDSGDADTAASLFHPGVTIHLWDGVTFTSREEFREWFERLFSTSKDAWRRIERLEVDGDTVVVEVTLEFTLN

SEQ ID NO: 2360 - protein, 156 aa, synthetic construct
GQKHRVRLLHVFRFRGNRVTEVRVVIEFLTPAEKLRELFAGADYEGRERWEAFRAEAEALLAAGGPPSLSEEQIRQFLRRFYEALDSGDADTAASLFHPGVTIHLWDGVTFTSREEFREWFERLFSTSKDAWRRILRLEVRGDTVLVEVELTFTLN

SEQ ID NO: 2361 - protein, 156 aa, synthetic construct
GQKHEVELLHFFRFRGNRVTEVEVVIRFLTPAEAARELHAGANYAGDERWEAALAAFRARLAAGGPPSLTEEQIRQFLRRFYEALDSGDADTAASLFHPGVTIHLWDGVTFTSREEFREWFERLFSTSKDAWREILELEVRGDTVLVRVRLTFTLN

SEQ ID NO: 2362 - protein, 156 aa, synthetic construct
GQKHRVRLLHEFRFRGNRVTEVEVTIRFLTPAEAARELHAGADEEADARWEAFRARARARLAAGGPPSLSEEQIRQFLRRFYEALDSGDADTAASLFHPGVTIHLWDGVTFTSREEFREWFERLFSTSKDAWREILRLEVRGDTVLVEVELTFTLN

SEQ ID NO: 2363 - protein, 156 aa, synthetic construct
GQKHTVRLLHLFRFRGNRVTHVEVVIQFLSPADKALELHAGSREEGEARWEAARARFRALLAAGGPPSLSEEQIRQFLRRFYEALDSGDADTAASLFHPGVTIHLWDGVTFTSREEFREWFERLFSTSKDAWRRIERLEVRGDTVLVEVTLEFTLN

SEQ ID NO: 2364 - protein, 156 aa, synthetic construct
GQKHVVRLLHLFRFRGNRVTEVEVVIRFLTPATALLELHAGATEAGEARWAAARAAARARLAAGGPPSLTEEQIRQFLRRFYEALDSGDADTAASLFHPGVTIHLWDGVTFTSREEFREWFERLFSTSKDAWRRIDALEVRGDTVLVEVTLTFTLN

SEQ ID NO: 2365 - protein, 156 aa, synthetic construct
GQKHRVRLLHLFRFRGNRVTEVEVVIEFLTPATKALELHAGTNYAGEARWEAFRAAARARLAAGGPPSLTEEQIRQFLRRFYEALDSGDADTAASLFHPGVTIHLWDGVTFTSREEFREWFERLFSTSKDAWREILELEVRGDTVLVEVELTFTLN

SEQ ID NO: 2366 - protein, 156 aa, synthetic construct
GQKHVVELLHLFEFRGNRVTRVEVVIRFLTPAEKALELHKGTNYEGEERWEAFRAEARARLAAGGPPSLSEEQIRQFLRRFYEALDSGDADTAASLFHPGVTIHLWDGVTFTSREEFREWFERLFSTSKDAWREILELEVRGDTVLVRVRLEFTLN

SEQ ID NO: 2367 - protein, 156 aa, synthetic construct
GQKHVVELLHVFRFRGNRVTEVEVVIRFLTPAEKLLELHAGATEEGDERWEAFEAEARALLAAGGPPSLSEEQIRQFLRRFYEALDSGDADTAASLFHPGVTIHLWDGVTFTSREEFREWFERLFSTSKDAWRHIESLEVRGDTVLVRVTLTFTLN

SEQ ID NO: 2368 - protein, 156 aa, synthetic construct
GQKHRVRLLHLFRFRGNRVTEVRVVIRFLTPADKALELHKGANYEGDERWEAALAEAEAALAAGGPPSLSEEQIRQFLRRFYEALDSGDADTAASLFHPGVTIHLWDGVTFTSREEFREWFERLFSTSKDAWRHIERLVVRGDTVLVEVVLEFTLN

SEQ ID NO: 2369 - protein, 156 aa, synthetic construct
GQKHEVELLHLFEFRGNRVTRVEVEIRFLTPSEKARELHAGANEEGDERWEAFLARARALLAAGGPPSLSEEQIRQFLRRFYEALDSGDADTAASLFHPGVTIHLWDGVTFTSREEFREWFERLFSTSKDAWREILELEVRGDTVLVRVRLTFTLN

SEQ ID NO: 2370 - protein, 156 aa, synthetic construct
GQKHVVRLLHLFRFRGNRVTEVEVVIRFLTPAEKLKELHAGANWDGDERWEAARAAARARLAAGGPPSLTEEQIRQFLRRFYEALDSGDADTAASLFHPGVTIHLWDGVTFTSREEFREWFERLFSTSKDAWRRIDRLEVRGDTVLVEVTLTFTLN

SEQ ID NO: 2371 - protein, 156 aa, synthetic construct
GQKHVVRLLHLFRFRGNRVTEVRVEIRFLTPADKLLELHAGANYDGEARWAAFRAEARALLAAGGPPSLSEEQIRQFLRRFYEALDSGDADTAASLFHPGVTIHLWDGVTFTSREEFREWFERLFSTSKDAWRRIERLEVRGDTVLVEVTLEFTLN

SEQ ID NO: 2372 - protein, 156 aa, synthetic construct
GQKHVVELLHYFEFRGNRVTRVEVVIRFLTPAEKLKELHAGANEEGEARWAAFEAAAEARLAAGGPPSLSEEQIRQFLRRFYEALDSGDADTAASLFHPGVTIHLWDGVTFTSREEFREWFERLFSTSKDAWREILELRVRGDTVLVRVRLTFTLN

SEQ ID NO: 2373 - protein, 156 aa, synthetic construct
GQKHVVELLHYFRFRGNRVTEVEVVIRFLTPAERLRELFAGATEEADARWEAFRAEAEARLAAGGPPSISEEQIRQFLRRFYEALDSGDADTAASLFHPGVTIHLWDGVTFTSREEFREWFERLFSTSKDAWRRIRRLEVRGDTVLVEVELEFTLN

SEQ ID NO: 2374 - protein, 156 aa, synthetic construct
GQKHVVELLHLFRFRGNRVTEVEVVIRFLTPAERARELHAGANEEGEARWEAALARARALLAAGGPPSLSEEQIRQFLRRFYEALDSGDADTAASLFHPGVTIHLWDGVTFTSREEFREWFERLFSTSKDAWREILELEVRGDTVLVRVRLEFTLN

SEQ ID NO: 2375 - protein, 156 aa, synthetic construct
GQKHVVRLLHLFEFRGNRVTRVEVEIEFLTPATKLLELHAGANYEGDARWEAFREEARARLAAGGPPSLSEEQIRQFLRRFYEALDSGDADTAASLFHPGVTIHLWDGVTFTSREEFREWFERLFSTSKDAWRRIERLEVRGDTVLVEVTLEFTLN

SEQ ID NO: 2376 - protein, 156 aa, synthetic construct
GQKHVVELLHLFRFRGNRVTEVEVEIRFLSPATKALELHAGANEEGEERWEAALARARALLAAGGPPSLSEEQIRQFLRRFYEALDSGDADTAASLFHPGVTIHLWDGVTFTSREEFREWFERLFSTSKDAWREILRLEVRGDTVLVEVRLTFTLN

SEQ ID NO: 2377 - protein, 156 aa, synthetic construct
GQKHRVRLLHLFRFRGNRVTEVEVVIRFLTPAEAARALHAGANEEGDERWEAFRAAARARLAAGGPPSLTEEQIRQFLRRFYEALDSGDADTAASLFHPGVTIHLWDGVTFTSREEFREWFERLFSTSKDAWRRILSLEVRGDTVLVEVELEFTLN

SEQ ID NO: 2378 - protein, 156 aa, synthetic construct
GQKHEVELLHLFRFRGNRVTEVEVVIRFLTPAEKLKELFAGAREEGDARWEAFRAEARARLAAGGPPSLSEEQIRQFLRRFYEALDSGDADTAASLFHPGVTIHLWDGVTFTSREEFREWFERLFSTSKDAWREIEELEVRGDTVLVRVRLTFTLN

SEQ ID NO: 2379 - protein, 156 aa, synthetic construct
GQKHRVRLLHTFRFRGNRVTEVRVTIRFLTPAERARELHAGADAEGDARWEAALAAARAALAAGGPPSLSEEQIRQFLRRFYEALDSGDADTAASLFHPGVTIHLWDGVTFTSREEFREWFERLFSTSKDAWRRILELEVRGDTVLVEVELDFTLN

SEQ ID NO: 2380 - protein, 157 aa, synthetic construct
GQKHTVRLLHIFRFRGNRVTEVHVIIEPVDDSLPVLEPYFGGGRFRGARERAEALRAAIRAEVEGRPSSLSEEQIRQFLRRFYEALDSGDADTAASLFHPGVTIHLWDGVTFTSREEFREWFERLFSTSKDAWRRILRLEVVGDTVFVEVELTFTLN

SEQ ID NO: 2381 - protein, 157 aa, synthetic construct
GQKHVVRLTHVFRFRGNRVTEVRVIIEPVDDSLEVLAPYFGGGAFEGARERAAAELAAIRAEVEGRPASLSEEQIRQFLRRFYEALDSGDADTAASLFHPGVTIHLWDGVTFTSREEFREWFERLFSTSKDAWREILRLEVIGDTVFVEVELTFTLN

SEQ ID NO: 2382 - protein, 157 aa, synthetic construct
GQKHVVRLLHIFHFRGNRVTEVRVTIVPVDDSLPVLAPAFGGGALEGAEARAAAEEAALRARVAGRPASLSEEQIRQFLRRFYEALDSGDADTAASLFHPGVTIHLWDGVTFTSREEFREWFERLFSTSKDAWRRIEALEVEGDTVFVRVTLTFTLN

SEQ ID NO: 2383 - protein, 157 aa, synthetic construct
GQKHTVRLRHVFRFRGNRVTEVEVEIVPVDDSLPVLEKYFGGGALEGAAERAEARAAALRAEVAGRPASLSEEQIRQFLRRFYEALDSGDADTAASLFHPGVTIHLWDGVTFTSREEFREWFERLFSTSKDAWRRITRLEVLGDTVFVDVTLTFTLN

SEQ ID NO: 2384 - protein, 157 aa, synthetic construct
GQKHVVELLHIFRFRGNRVTEVRVEIVPVDDSLEVLAPYLGSGRLEGAAERAEALRAAIRAEVEGRPASLSEEQIRQFLRRFYEALDSGDADTAASLFHPGVTIHLWDGVTFTSREEFREWFERLFSTSKDAWRRILELEVVGDTVFVRVRLEFTLN

SEQ ID NO: 2385 - protein, 157 aa, synthetic construct
GQKHVVRLLHIFRFRGNRVTEVRVYIVPEDDSLPVLEPFLGSGALAGAAERAEAERAAIRAEVAGKPSSLSEEQIRQFLRRFYEALDSGDADTAASLFHPGVTIHLWDGVTFTSREEFREWFERLFSTSKDAWREIERLEVEGDTVFVTVRLTFTLN

SEQ ID NO: 2386 - protein, 157 aa, synthetic construct
GQKHVVRLLHIFRFRGNRVTEVWVEIVPVDDSLPVLEKYFGSGRLEGAEERARRLEEEIRRRVEGRPSSLSEEQIRQFLRRFYEALDSGDADTAASLFHPGVTIHLWDGVTFTSREEFREWFERLFSTSKDAWREILDLEVIGDTVFVEVRLTFTLN

SEQ ID NO: 2387 - protein, 157 aa, synthetic construct
GQKHVVRLRHIFRFRGNRVTEVRVFIVPEDDSLAVLEPFFGSGRLEGMEERAEATLAALRAEVEGRPASLSEEQIRQFLRRFYEALDSGDADTAASLFHPGVTIHLWDGVTFTSREEFREWFERLFSTSKDAWRRIERLEVVGDTVFVDVVLTFTLN

SEQ ID NO: 2388 - protein, 157 aa, synthetic construct
GQKHTVRLLHIFRFRGNRVTEVRVWIVPEDDSLPVLSEAFGGGRFEGAAEEAEAEAAAIRAEVEGRPASLSEEQIRQFLRRFYEALDSGDADTAASLFHPGVTIHLWDGVTFTSREEFREWFERLFSTSKDAWREIERLEVIGDTVFVEVVLTFTLN

SEQ ID NO: 2389 - protein, 157 aa, synthetic construct
GQKHTVRLLHIFHFRGNRVTEVRVWIVPVDDSLAVLSPAFGGGRFEGAAERAEAEEAAIRAAVEGRPSSLSEEQIRQFLRRFYEALDSGDADTAASLFHPGVTIHLWDGVTFTSREEFREWFERLFSTSKDAWRRIERLEVIGDTVFVEVTLTFTLN

SEQ ID NO: 2390 - protein, 157 aa, synthetic construct
GQKHVVRLLHIFRFRGNRVTEVEVHIVPVDDSLPVLKEYFGGGSLEGAAERAEATAAAVRAAVAGTPSSLSEEQIRQFLRRFYEALDSGDADTAASLFHPGVTIHLWDGVTFTSREEFREWFERLFSTSKDAWRRIEALEVEGDTVFVEVTLTFTLN

SEQ ID NO: 2391 - protein, 157 aa, synthetic construct
GQKHTVRLRHVFRFRGNRVTEVRVTIVPLDDSLAVLEPFFGGGGLAGAEERAEAELAAIRAEVAGRPASLSEEQIRQFLRRFYEALDSGDADTAASLFHPGVTIHLWDGVTFTSREEFREWFERLFSTSKDAWREITRLEVVGDTVFVDVVLTFTLN

SEQ ID NO: 2392 - protein, 157 aa, synthetic construct
GQKHVVELLHIFRFRGNRVTEVRVEIIPVDDSLPVLDKFFGGGRYEGAEERARELEAAILAEVEGRPASLSEEQIRQFLRRFYEALDSGDADTAASLFHPGVTIHLWDGVTFTSREEFREWFERLFSTSKDAWREILELRVVGDTVFVRVRLTFTLN

SEQ ID NO: 2393 - protein, 157 aa, synthetic construct
GQKHTVRLLHIFRFRGNRVTEVRVEIVPVDDSLPVLEPYFSGALLAGAEERAAALRAALLAEAAGRPASLSEEQIRQFLRRFYEALDSGDADTAASLFHPGVTIHLWDGVTFTSREEFREWFERLFSTSKDAWRRILELEVVGDTVFVEVELTFTLN

SEQ ID NO: 2394 - protein, 157 aa, synthetic construct
GQKHVVELLHIFHFRGNRVTEVRVHIVPVDDSLPVLDPFFGGGRLAGAAEAAAAEEAAIRAEVAGRAPSLSEEQIRQFLRRFYEALDSGDADTAASLFHPGVTIHLWDGVTFTSREEFREWFERLFSTSKDAWREILELEVIGDTVFVRVRLTFTLN

SEQ ID NO: 2395 - protein, 157 aa, synthetic construct
GQKHTVRLLHIFHFRGNRVTEVRVYIVPVDDSLPVLEPFFGGGALEGAAERAEAERAAVRAEVEGRPSSLSEEQIRQFLRRFYEALDSGDADTAASLFHPGVTIHLWDGVTFTSREEFREWFERLFSTSKDAWREIVELEVIGDTVFVEVVLTFTLN

SEQ ID NO: 2396 - protein, 157 aa, synthetic construct
GQKHVVRLTHIFEFRGNRVTRVRVWIEPVDDSLPVLDPYFGSGLYAGAAERAEAELAAIRAEVAGRPASLSEEQIRQFLRRFYEALDSGDADTAASLFHPGVTIHLWDGVTFTSREEFREWFERLFSTSKDAWRRILELEVVGDTVFVRVELTFTLN

SEQ ID NO: 2397 - protein, 157 aa, synthetic construct
GQKHTVELLHIFRFRGNRVTEVRVEIVPVDDSLPVLSPFFGGGSLEGAAERAAELRAAIRAEVEGRPSSLSEEQIRQFLRRFYEALDSGDADTAASLFHPGVTIHLWDGVTFTSREEFREWFERLFSTSKDAWREILELEVIGDTVFVRVRLTFTLN

SEQ ID NO: 2398 - protein, 157 aa, synthetic construct
GQKHVVRLLHIFRFRGNRVTEVHVIIVPVDDSEAVLNEFFGGGRFAGAEERAEALRAAIRAEVEGRPSSLSEEQIRQFLRRFYEALDSGDADTAASLFHPGVTIHLWDGVTFTSREEFREWFERLFSTSKDAWREILRLEVLGDTVFVEVRLTFTLN

SEQ ID NO: 2399 - protein, 157 aa, synthetic construct
GQKHTVRLRHVFRFRGNRVTEVRVTIVPVDDSLPVLAEYFGSGSFEGAAERADAELAALRAEAAGRPASLSEEQIRQFLRRFYEALDSGDADTAASLFHPGVTIHLWDGVTFTSREEFREWFERLFSTSKDAWRRIERLEVVGDTVFVDVTLEFTLN

SEQ ID NO: 2400 - protein, 158 aa, synthetic construct
GQKHRVRLYHVFHFRGNRVTEVEVRIVPLSGGPLYEFLKGFTLADRGAIEAEVAAEREALLAEAAARPPEISEEQIRQFLRRFYEALDSGDADTAASLFHPGVTIHLWDGVTFTSREEFREWFERLFSTSKDAWREILDLRVVGDTVIVEVELTFTLN

SEQ ID NO: 2401 - protein, 158 aa, synthetic construct
GQKHRVELLHVFHFRGNRVTEVRVRIVPLSGGLTLEFLEGLVLKDRGALREEAEAEAAELAARAAARPPEISEEQIRQFLRRFYEALDSGDADTAASLFHPGVTIHLWDGVTFTSREEFREWFERLFSTSKDAWREILELRVVGDTVIVRVLLEFTLN

SEQ ID NO: 2402 - protein, 158 aa, synthetic construct
GQKHEVRLYHVFRFRGNRVTEVRVRIVPLSGGATLEFLSKFVLKDTGAIEEEVEAERERLLAEAAARPPEISEEQIRQFLRRFYEALDSGDADTAASLFHPGVTIHLWDGVTFTSREEFREWFERLFSTSKDAWREILELEVVGDTVIVVVRLTFTLN

SEQ ID NO: 2403 - protein, 158 aa, synthetic construct
GQKHRVRLYHTFRFRGNRVTEVRVRIVPLSGGKTLEFLEKFTLKDTGAIEAEVEAERARLRAEAAARPPEISEEQIRQFLRRFYEALDSGDADTAASLFHPGVTIHLWDGVTFTSREEFREWFERLFSTSKDAWRHILRLEVVGDTVIVEVELEFTLN

SEQ ID NO: 2404 - protein, 158 aa, synthetic construct
GQKHRVRLRHVFRFRGNRVTEVRVTITPLSGGLTEEFLAKFTLKDRGEIAARAEAEAAALKAEAAARPPSISEEQIRQFLRRFYEALDSGDADTAASLFHPGVTIHLWDGVTFTSREEFREWFERLFSTSKDAWRRILRLTVVGDTVVVEVELEFTLN

SEQ ID NO: 2405 - protein, 158 aa, synthetic construct
GQKHTVRLTHVFRFRGNRVTEVRVRIVPLSGGLTKELLEKFVVKDVGAIAAEVEAERAALVAEAAARPPSISEEQIRQFLRRFYEALDSGDADTAASLFHPGVTIHLWDGVTFTSREEFREWFERLFSTSKDAWRHIEALEVVGDTVIVTVTLEFTLN

SEQ ID NO: 2406 - protein, 158 aa, synthetic construct
GQKHRVRLYHVFRFRGNRVTEVEVRIVPLSGGATLEFLEGFVLKDTGEIEAEVEARRAALLAEAAARPASISEEQIRQFLRRFYEALDSGDADTAASLFHPGVTIHLWDGVTFTSREEFREWFERLFSTSKDAWRRILRLEVVGDTVIVEVELEFTLN

SEQ ID NO: 2407 - protein, 158 aa, synthetic construct
GQKHTVELYHVFHFRGNRVTEVRVRIVPLSGGPLLEFLEKFTLKSTGEIRREVEAEKERLLAEEAARPPEISEEQIRQFLRRFYEALDSGDADTAASLFHPGVTIHLWDGVTFTSREEFREWFERLFSTSKDAWRRIKELRVVGDTVIVEVELTFTLN

SEQ ID NO: 2408 - protein, 158 aa, synthetic construct
GQKHTVELYHVFRFRGNRVTEVEVRIVPLSGGATLALLAKYVVKDTGAIRAEVEARREALLAEAAARPPSISEEQIRQFLRRFYEALDSGDADTAASLFHPGVTIHLWDGVTFTSREEFREWFERLFSTSKDAWRRIEELEVVGDTVIVRVTLTFTLN

SEQ ID NO: 2409 - protein, 158 aa, synthetic construct
GQKHTVELYHVFRFRGNRVTEVEVEIVPLSGGKTLEFLEKFTLKDRGAIRERAEARRAELRREAAARPPEISEEQIRQFLRRFYEALDSGDADTAASLFHPGVTIHLWDGVTFTSREEFREWFERLFSTSKDAWRHIEELEVVGDTVIVRVRLEFTLN

SEQ ID NO: 2410 - protein, 158 aa, synthetic construct
GQKHTVRLTHVFRFRGNRVTEVRVRIVPLSGGKTLEFLAKFTLADTGALAAAAAAEAAALRAAAAARPPEWSEEQIRQFLRRFYEALDSGDADTAASLFHPGVTIHLWDGVTFTSREEFREWFERLFSTSKDAWREILELDVVGDTVIVTVRLTFTLN

SEQ ID NO: 2411 - protein, 158 aa, synthetic construct
GQKHTVLLTHVFEFRGNRVTRVRVRITPLSGGPLLELLEKLVLKDTGEIRKEVEAEKERLIAEQAARPPSISEEQIRQFLRRFYEALDSGDADTAASLFHPGVTIHLWDGVTFTSREEFREWFERLFSTSKDAWREILELEVVGDTVVVDVRLTFTLN

SEQ ID NO: 2412 - protein, 158 aa, synthetic construct
GQKHVVELYHVFHFRGNRVTRVEVRIVPISGGKLKELLEKLVLKDIGEIRKEVEERKAELLREAAARPPEISEEQIRQFLRRFYEALDSGDADTAASLFHPGVTIHLWDGVTFTSREEFREWFERLFSTSKDAWREIEELEVVGDTVIVKVRLTFTLN

SEQ ID NO: 2413 - protein, 158 aa, synthetic construct
GQKHRVRLYHVFEFRGNRVTRVRVRIVPLSGGKLLEFLAKFTLKSTGEIEAEVEAEEAELLARAAARPPSISEEQIRQFLRRFYEALDSGDADTAASLFHPGVTIHLWDGVTFTSREEFREWFERLFSTSKDAWRRILELRVVGDTVIVRVELTFTLN

SEQ ID NO: 2414 - protein, 158 aa, synthetic construct
GQKHVVRLTHVFRFRGNRVTEVRVRIVPLSGGPTLALLEGLVLRDRGALAAEVEAERAALRAEAAARPPSISEEQIRQFLRRFYEALDSGDADTAASLFHPGVTIHLWDGVTFTSREEFREWFERLFSTSKDAWRRIERLEVVGDTVIVEVTLTFTLN

SEQ ID NO: 2415 - protein, 158 aa, synthetic construct
GQKHRVELLHVFHFRGNRVTEVEVRIVPLSGGALEDFLAKFTLASRGEIRREAEARAEALVAEAAARPPSISEEQIRQFLRRFYEALDSGDADTAASLFHPGVTIHLWDGVTFTSREEFREWFERLFSTSKDAWRRIRELRVVGDTVIVEVELEFTLN

SEQ ID NO: 2416 - protein, 158 aa, synthetic construct
GQKHVVELYHVFRFRGNRVTEVEVRIVPLSGGPLLEFLEKFVLKTTGEIRAEAEARAAALRAEAAARPPSISEEQIRQFLRRFYEALDSGDADTAASLFHPGVTIHLWDGVTFTSREEFREWFERLFSTSKDAWRRIEALEVVGDTVIVRVRLEFTLN

SEQ ID NO: 2417 - protein, 158 aa, synthetic construct
GQKHRVRLLHVFHFRGNRVTEVEVRIVPLSGGPLLAFLEKLTLKDTGAIAAEAAARRAALLAAAAARPASISEEQIRQFLRRFYEALDSGDADTAASLFHPGVTIHLWDGVTFTSREEFREWFERLFSTSKDAWRRILELEVVGDTVIVEVELEFTLN

SEQ ID NO: 2418 - protein, 158 aa, synthetic construct
GQKHVVELLHVFHFRGNRVTEVEVRIVPLSGGKTLEFLSKFTVKDTGAIRAEEEARAAALVAEAAARPPSISEEQIRQFLRRFYEALDSGDADTAASLFHPGVTIHLWDGVTFTSREEFREWFERLFSTSKDAWREILELRVVGDTVIVRVRLEFTLN

SEQ ID NO: 2419 - protein, 158 aa, synthetic construct
GQKHRVLLRHVFEFRGNRVTRVEVRIVPLSGGLTLELLKGFTLESRGEILAEAEAEEAALRAAAAARPPSISEEQIRQFLRRFYEALDSGDADTAASLFHPGVTIHLWDGVTFTSREEFREWFERLFSTSKDAWRRILRLEVVGDTVIVTVLLEFTLN

SEQ ID NO: 2420 - protein, 159 aa, synthetic construct
GQKHEVLLLHRFVFRGNRVTEVEVVIAPLTPDDVALAVLAALGAVPRPGREAELEALEEETLAAAAGRAPSLSEEQIRQFLRRFYEALDSGDADTAASLFHPGVTIHLWDGVTFTSREEFREWFERLFSTSKDAWREILELRVIGDTVLVRVRLTFTLN

SEQ ID NO: 2421 - protein, 159 aa, synthetic construct
GQKHTVRLLHLFRFRGNRVTEVRVVIVPVDPETAAAAVLAALGYVPRPGREAELERLRAETRAAAADAAPSLSEEQIRQFLRRFYEALDSGDADTAASLFHPGVTIHLWDGVTFTSREEFREWFERLFSTSKDAWRHIEELEVIGDTVLVEVTLEFTLN

SEQ ID NO: 2422 - protein, 159 aa, synthetic construct
GQKHRVLLLHRFRFRGNRVTEVEVVIAPVDPDEVALAVLAALGAVPVPGRRAELEALRAATRAEAAGRAPSLSEEQIRQFLRRFYEALDSGDADTAASLFHPGVTIHLWDGVTFTSREEFREWFERLFSTSKDAWRRILELEVIGDTVLVLVELEFTLN

SEQ ID NO: 2423 - protein, 159 aa, synthetic construct
GQKHTVRLVHVFRFRGNRVTEVRVVIEPVDPETVAGEVLAALGFVPRPGRAAELEELRERTRREAAGRRPSLSEEQIRQFLRRFYEALDSGDADTAASLFHPGVTIHLWDGVTFTSREEFREWFERLFSTSKDAWRRILRLEVIGDTVVVEVELTFTLN

SEQ ID NO: 2424 - protein, 159 aa, synthetic construct
GQKHTVLLVHVFRFRGNRVTEVEVVIAPVDPEEAAAAKLAELGAVPRPGREEELEALREAVRRAAADRAPSLSEEQIRQFLRRFYEALDSGDADTAASLFHPGVTIHLWDGVTFTSREEFREWFERLFSTSKDAWREILELEVIGDTVVVTVRLDFTLN

SEQ ID NO: 2425 - protein, 159 aa, synthetic construct
GQKHTVRLVHVFRFRGNRVTEVRVEIAPVDPDTVAGAVLASLGYVPRPGRRAALDALRAATRAAAAGRAPSLSEEQIRQFLRRFYEALDSGDADTAASLFHPGVTIHLWDGVTFTSREEFREWFERLFSTSKDAWRHIEELEVIGDTVVVTVTLTFTLN

SEQ ID NO: 2426 - protein, 159 aa, synthetic construct
GQKHTVRLVHVFHFRGNRVTHVEVVIVPVDPETDALEVLAELGAVPRPGREEEAEALRATLRAEKADAAPSLSEEQIRQFLRRFYEALDSGDADTAASLFHPGVTIHLWDGVTFTSREEFREWFERLFSTSKDAWREIEELEVIGDTVVVTVTLTFTLN

SEQ ID NO: 2427 - protein, 159 aa, synthetic construct
GQKHVVRLLHVFRFRGNRVTEVRVVIEPVTPETEALAVLASLGAVPRPGRAEDLEALRAATRAAAAGRAPSLSEEQIRQFLRRFYEALDSGDADTAASLFHPGVTIHLWDGVTFTSREEFREWFERLFSTSKDAWREILELEVIGDTVVVLVELTFTLN

SEQ ID NO: 2428 - protein, 159 aa, synthetic construct
GQKHTVRLLHRFVFRGNRVTEVEVVIVPVDPETAALEALAALGAVPRPGREEELERLRAETLAAAADREPSLSEEQIRQFLRRFYEALDSGDADTAASLFHPGVTIHLWDGVTFTSREEFREWFERLFSTSKDAWRRIRELEVIGDTVLVEVELEFTLN

SEQ ID NO: 2429 - protein, 159 aa, synthetic construct
GQKHTVRLVHVFRFRGNRVTEVEVVIVPVDPETVAGEVLAKLGYVPEPGREAALEELRERIRREKADAAPTLSEEQIRQFLRRFYEALDSGDADTAASLFHPGVTIHLWDGVTFTSREEFREWFERLFSTSKDAWRHIEELEVIGDTVVVRVTLEFTLN

SEQ ID NO: 2430 - protein, 159 aa, synthetic construct
GQKHTVELVHVFRFRGNRVTEVRVEIVPVDPDTVALEVLAKLGAVPRPGRREALEALRAETLAAAAGREPSLSEEQIRQFLRRFYEALDSGDADTAASLFHPGVTIHLWDGVTFTSREEFREWFERLFSTSKDAWREILELEVVGDTVVVRVRLEFTLN

SEQ ID NO: 2431 - protein, 159 aa, synthetic construct
GQKHVVRLVHVFRFRGNRVTEVRVVIAPVDPETAALEALSSLGAVPEPGREEELERLRREIREEARDREPSLSEEQIRQFLRRFYEALDSGDADTAASLFHPGVTIHLWDGVTFTSREEFREWFERLFSTSKDAWRRILELEVIGDTVVVEVELTFTLN

SEQ ID NO: 2432 - protein, 159 aa, synthetic construct
GQKHTVLLVHRFVFRGNRVTEVEVVIAPVDPETVALEVLAKLGAVPRPGRREELERLIEETRRAAADREPSLSEEQIRQFLRRFYEALDSGDADTAASLFHPGVTIHLWDGVTFTSREEFREWFERLFSTSKDAWRRILRLEVIGDTVVVTVELTFTLN

SEQ ID NO: 2433 - protein, 159 aa, synthetic construct
GQKHTVRLVHVFRFRGNRVTEVRVVIEPVDPETVALEVLSSLGAVPRPGRREELEALRRETRERARDAAPSLSEEQIRQFLRRFYEALDSGDADTAASLFHPGVTIHLWDGVTFTSREEFREWFERLFSTSKDAWREILSLEVIGDTVVVEVELTFTLN

SEQ ID NO: 2434 - protein, 159 aa, synthetic construct
GQKHRVRLLHVFRFRGNRVTEVEVVIVPLDPESAALARLASLGAVPLPGREELLEAARERVRREAAGAAPSLSEEQIRQFLRRFYEALDSGDADTAASLFHPGVTIHLWDGVTFTSREEFREWFERLFSTSKDAWRHIERLEVIGDTVVVEVTLEFTLN

SEQ ID NO: 2435 - protein, 159 aa, synthetic construct
GQKHTVRLVHVFRFRGNRVTEVRVEIEPVDPDDVALAVLAALGAVPEPGRRERLEALRERVREEARDREPSLTEEQIRQFLRRFYEALDSGDADTAASLFHPGVTIHLWDGVTFTSREEFREWFERLFSTSKDAWRRILELEVIGDTVVVEVELTFTLN

SEQ ID NO: 2436 - protein, 159 aa, synthetic construct
GQKHVVLLTHVFTFRGNRVTHVEVEIVPLTPDTAALAVLASLGAVPLPGRWPLLEALRARTLAERAGAAPSLSEEQIRQFLRRFYEALDSGDADTAASLFHPGVTIHLWDGVTFTSREEFREWFERLFSTSKDAWREILELEVVGDTVVVLVRLTFTLN

SEQ ID NO: 2437 - protein, 159 aa, synthetic construct
GQKHTVRLVHVFRFRGNRVTEVEVVIVPVDPETVALEVLAALGAVPRPGRWEEAEALRERVRREAADAAPSLSEEQIRQFLRRFYEALDSGDADTAASLFHPGVTIHLWDGVTFTSREEFREWFERLFSTSKDAWREILELEVIGDTVVVEVELTFTLN

SEQ ID NO: 2438 - protein, 159 aa, synthetic construct
GQKHTVRLLHRFRFRGNRVTEVEVVIVPVDPEDVALAVLASLGAVPRPGREEDLERLRAETRAAAAGAAPSLSEEQIRQFLRRFYEALDSGDADTAASLFHPGVTIHLWDGVTFTSREEFREWFERLFSTSKDAWREILELEVIGDTVLVTVRLTFTLN

SEQ ID NO: 2439 - protein, 159 aa, synthetic construct
GQKHTVRLLHVFRFRGNRVTEVRVVIVPVDPDTVALEVLARLGAVPVPGREEELEAAREATLREAAGRAPSLSEEQIRQFLRRFYEALDSGDADTAASLFHPGVTIHLWDGVTFTSREEFREWFERLFSTSKDAWRRILRLEVVGDTVLVEVELTFTLN

SEQ ID NO: 2440 - protein, 160 aa, synthetic construct
GQKHVVRLVHVFEFRGNRVTRVEVDIVLEDDGAAVNAAHAALSAAVPGDGGREAVAARVAARRAEVAGRPPSISEEQIRQFLRRFYEALDSGDADTAASLFHPGVTIHLWDGVTFTSREEFREWFERLFSTSKDAWRRIERLEVLGDTVFVEVTLTFTLN

SEQ ID NO: 2441 - protein, 160 aa, synthetic construct
GQKHRVRLVHVFHFRGNRVTEVRVRIVLLSDGEAVNKAHAELAAPIRGDGGEAEMEAFVAELRAEEAGRPPEISEEQIRQFLRRFYEALDSGDADTAASLFHPGVTIHLWDGVTFTSREEFREWFERLFSTSKDAWREILRLEVIGDTVFVEVELTFTLN

SEQ ID NO: 2442 - protein, 160 aa, synthetic construct
GQKHVVRLLHVFHFRGNRVTEVEVDIHVVDDGEAVNKAHAALAAPIPGAGGEEAIAARRAELRAAVAGRPASISEEQIRQFLRRFYEALDSGDADTAASLFHPGVTIHLWDGVTFTSREEFREWFERLFSTSKDAWRRILDLEVIGDTVFVEVELTFTLN

SEQ ID NO: 2443 - protein, 160 aa, synthetic construct
GQKHRVRLVHVFRFRGNRVTEVEVDIVLESGGGAVQKAHGSLSAPIPGGGGREAMEARVAELRAREAGRPPSISEEQIRQFLRRFYEALDSGDADTAASLFHPGVTIHLWDGVTFTSREEFREWFERLFSTSKDAWRRILRLEVIGDTVIVEVLLEFTLN

SEQ ID NO: 2444 - protein, 160 aa, synthetic construct
GQKHVVELLHVFRFRGNRVTEVEVRIVVLDDGEAVNKAHAELSAPIPGAGGRAEVAAWRAALRAAVAGEPPSISEEQIRQFLRRFYEALDSGDADTAASLFHPGVTIHLWDGVTFTSREEFREWFERLFSTSKDAWREILDLEVVGDTVFVEVRLTFTLN

SEQ ID NO: 2445 - protein, 160 aa, synthetic construct
GQKHVVRLLHIFRFRGNRVTEVEVRIVLEDDGGAVNAAHAALSAAIPGDGGEAEMEAHLAELRAAVAGAPPQISEEQIRQFLRRFYEALDSGDADTAASLFHPGVTIHLWDGVTFTSREEFREWFERLFSTSKDAWREIEELEVVGDTVFVRVRLTFTLN

SEQ ID NO: 2446 - protein, 160 aa, synthetic construct
GQKHVVRLVHVFHFRGNRVTRVEVDIVVEDDGAAVDKAHAELSAPIAGAGGEEAMRARVAALRAAEAGRPPSISEEQIRQFLRRFYEALDSGDADTAASLFHPGVTIHLWDGVTFTSREEFREWFERLFSTSKDAWREILRLEVIGDTVIVEVRLTFTLN

SEQ ID NO: 2447 - protein, 160 aa, synthetic construct
GQKHRVRLVHVFRFRGNRVTEVRVRIHVVDDGGAVNKAHGELSAPIAGNGAEAEIEAWVAELRAEVAGRPPSISEEQIRQFLRRFYEALDSGDADTAASLFHPGVTIHLWDGVTFTSREEFREWFERLFSTSKDAWREILRLEVIGDTVFVEVELTFTLN

SEQ ID NO: 2448 - protein, 160 aa, synthetic construct
GQKHVVRLVHVFRFRGNRVTEVEVDIVLEDDGEAVQKAHAALAAPIPGAGRREEAEARVAALRAAVAGAPASISEEQIRQFLRRFYEALDSGDADTAASLFHPGVTIHLWDGVTFTSREEFREWFERLFSTSKDAWREIEALEVVGDTVFVTVRLTFTLN

SEQ ID NO: 2449 - protein, 160 aa, synthetic construct
GQKHVVRLLHVFRFRGNRVTEVEVDIVVEDDGAAVDKAHAALSAPVPGAGGREAMEARLAALRAAEAGRPPSISEEQIRQFLRRFYEALDSGDADTAASLFHPGVTIHLWDGVTFTSREEFREWFERLFSTSKDAWRHIEALEVVGDTVFVRVTLEFTLN

SEQ ID NO: 2450 - protein, 160 aa, synthetic construct
GQKHTVRLVHVFRFRGNRVTEVRVRIVRLDDGEAVDKAHAELAAPVAGKGGLAEVEAEVAALRAEVAGRPPSISEEQIRQFLRRFYEALDSGDADTAASLFHPGVTIHLWDGVTFTSREEFREWFERLFSTSKDAWRQIDELEVIGDTVFVRVTLTFTLN

SEQ ID NO: 2451 - protein, 160 aa, synthetic construct
GQKHVVELVHVFRFRGNRVTEVEVRIRRLDDGGAVDAAHGALAAPIPGDGAEAAIAAWVAALRAAEAGRPPSISEEQIRQFLRRFYEALDSGDADTAASLFHPGVTIHLWDGVTFTSREEFREWFERLFSTSKDAWREILELEVIGDTVIVRVRLTFTLN

SEQ ID NO: 2452 - protein, 160 aa, synthetic construct
GQKHVVELVHVFDFRGNRVTAVRVRIVLLDDGGAVDKAHAALSAPIPGAGGRAAMEAEVAALRAAVAGRPPSISEEQIRQFLRRFYEALDSGDADTAASLFHPGVTIHLWDGVTFTSREEFREWFERLFSTSKDAWREITELEVIGDTVIVRVTLTFTLN

SEQ ID NO: 2453 - protein, 160 aa, synthetic construct
GQKHTVRLRHVFRFRGNRVTEVRVLIHLLDDGAAVNAAHSALSAPVAGDGEAARMEAEAAALRAEVAGAPPSISEEQIRQFLRRFYEALDSGDADTAASLFHPGVTIHLWDGVTFTSREEFREWFERLFSTSKDAWREIERLEVLGDTVFVDVTLTFTLN

SEQ ID NO: 2454 - protein, 160 aa, synthetic construct
GQKHTVRLVHVFHFRGNRVTRVEVDIVVVSGGGAINAAHAALSAPIPGDGGEAAMEARVAALRAAEAGRPPSISEEQIRQFLRRFYEALDSGDADTAASLFHPGVTIHLWDGVTFTSREEFREWFERLFSTSKDAWRHIESLEVVGDTVFVTVTLEFTLN

SEQ ID NO: 2455 - protein, 160 aa, synthetic construct
GQKHRVRLLHVFRFRGNRVTEVEVRIHLLDEGGAVNAAHSSLAAPIAGGGGLAEIEAFREELRAAVAGEPPEISEEQIRQFLRRFYEALDSGDADTAASLFHPGVTIHLWDGVTFTSREEFREWFERLFSTSKDAWREILDLEVIGDTVFVTVELTFTLN

SEQ ID NO: 2456 - protein, 160 aa, synthetic construct
GQKHVVRLVHVFRFRGNRVTEVEVEIVPVDDTEAVNKAHGELSAPIPGAGGEAAAAARVAALRAAEAGAPPEISEEQIRQFLRRFYEALDSGDADTAASLFHPGVTIHLWDGVTFTSREEFREWFERLFSTSKDAWRRILRLEVVGDTVVVEVELTFTLN

SEQ ID NO: 2457 - protein, 160 aa, synthetic construct
GQKHTVELLHVFRFRGNRVTEVEVDIVRLDDGAAVDKAHAALSAPIPGAGGREAMEARLAALRAEVAGEPPSISEEQIRQFLRRFYEALDSGDADTAASLFHPGVTIHLWDGVTFTSREEFREWFERLFSTSKDAWREILRLEVLGDTVFVEVRLTFTLN

SEQ ID NO: 2458 - protein, 160 aa, synthetic construct
GQKHTVRLVHVFRFRGNRVTEVEVDIVLEDEGDAVNKAHAALSAPIAGAGGRAAMEARVAALRAAEAGAPAEISEEQIRQFLRRFYEALDSGDADTAASLFHPGVTIHLWDGVTFTSREEFREWFERLFSTSKDAWREIERLEVVGDTVIVEVTLTFTLN

SEQ ID NO: 2459 - protein, 160 aa, synthetic construct
GQKHVVELVHIFEFRGNRVTRVRVLIHQLDAGDAVNAAHAALAAPVPGDGGAAAVEAEVAALRAAVAGRPASISEEQIRQFLRRFYEALDSGDADTAASLFHPGVTIHLWDGVTFTSREEFREWFERLFSTSKDAWREILSLEVEGDTVVVRVRLTFTLN

SEQ ID NO: 2460 - protein, 161 aa, synthetic construct
GQKHRVRLAHLFRFRGNRVTEVRVEIVGVDGSEDYFEVLGKLFNPNFSTENQEARLQALLDEWAARRGSGPPSLSEEQIRQFLRRFYEALDSGDADTAASLFHPGVTIHLWDGVTFTSREEFREWFERLFSTSKDAWRRILRLEVDGDTVLVEVELEFTLN

SEQ ID NO: 2461 - protein, 161 aa, synthetic construct
GQKHTVRLVHLFRFRGNRVTEVRVEIVVEDGSQEFLDVLAKLFNPNLTLEDQEERRAALLAEWEALRGSGPPSLSEEQIRQFLRRFYEALDSGDADTAASLFHPGVTIHLWDGVTFTSREEFREWFERLFSTSKDAWRRIDRLEVDGDTVLVEVTLEFTLN

SEQ ID NO: 2462 - protein, 161 aa, synthetic construct
GQKHVVRLVHLFRFRGNRVTEVRVEIVLVDGSEDFLKRLAELFNPNLSLENQEERRAALLAEWEALRGSGPPSLSEEQIRQFLRRFYEALDSGDADTAASLFHPGVTIHLWDGVTFTSREEFREWFERLFSTSKDAWRRIERLRVDGDTVLVEVVLEFTLN

SEQ ID NO: 2463 - protein, 161 aa, synthetic construct
GQKHRVRLVHLFVFRGNRVTEVRVEIVVEDGSEEFLEVLAKLFNPNLSLEDQEARRAALLAEWAARAGSGPPSLSEEQIRQFLRRFYEALDSGDADTAASLFHPGVTIHLWDGVTFTSREEFREWFERLFSTSKDAWRRIERLRVDGDTVLVEVTLEFTLN

SEQ ID NO: 2464 - protein, 161 aa, synthetic construct
GQKHRVRLVHLFRFRGNRVTEVRVEILVVDGSQDFLDVLAKLFNPNFTLENQEERVAALLAAWEAERGSGPPSLSEEQIRQFLRRFYEALDSGDADTAASLFHPGVTIHLWDGVTFTSREEFREWFERLFSTSKDAWRRITRLEVDGDTVLVEVELEFTLN

SEQ ID NO: 2465 - protein, 161 aa, synthetic construct
GQKHEVRLLHLFRFRGNRVTEVRVEILLVGGSKEFLEVLSKLFNPNLSEEDQEARLAALLAEWEALRGSGPPSLSEEQIRQFLRRFYEALDSGDADTAASLFHPGVTIHLWDGVTFTSREEFREWFERLFSTSKDAWREILRLEVDGDTVLVEVRLTFTLN

SEQ ID NO: 2466 - protein, 161 aa, synthetic construct
GQKHTVRLLHLFRFRGNRVTEVRVEITLVDGSDDFLKVLSELFNPNFSSENQQARRAALLAEWAARRGSGPPSLSEEQIRQFLRRFYEALDSGDADTAASLFHPGVTIHLWDGVTFTSREEFREWFERLFSTSKDAWRRIERLEVDGDTVLVEVTLEFTLN

SEQ ID NO: 2467 - protein, 161 aa, synthetic construct
GQKHTVRLLHLFRFRGNRVTEVRVVIELEDGSQDFLDVLSKLFNPDLSEEGQAERRQALLDEWEAEAGSGPPSLSEEQIRQFLRRFYEALDSGDADTAASLFHPGVTIHLWDGVTFTSREEFREWFERLFSTSKDAWREITELRVDGDTVLVEVRLTFTLN

SEQ ID NO: 2468 - protein, 161 aa, synthetic construct
GQKHVVRLAHLFEFRGNRVTEVRVEIVLEDGSKEFLDLLSKLFNPNLSEENQEERLQALLAEWEARRGSGPPSLSEEQIRQFLRRFYEALDSGDADTAASLFHPGVTIHLWDGVTFTSREEFREWFERLFSTSKDAWREILRLEVDGDTVLVEVRLTFTLN

SEQ ID NO: 2469 - protein, 161 aa, synthetic construct
GQKHTVRLLHLFRFRGNRVTEVRVEIVLEDGSEEFLELLSRLFNPDLTAEDQEARRAALLAEWEALRGSGPPSLSEEQIRQFLRRFYEALDSGDADTAASLFHPGVTIHLWDGVTFTSREEFREWFERLFSTSKDAWREITRLEVDGDTVLVEVRLTFTLN

SEQ ID NO: 2470 - protein, 161 aa, synthetic construct
GQKHEVELLHLFRFRGNRVTEVEVVIRLVGDSEEFLEVLAKLFNPDLSREGQDERYAALLARWEALKGSGPPSLSEEQIRQFLRRFYEALDSGDADTAASLFHPGVTIHLWDGVTFTSREEFREWFERLFSTSKDAWREITRLEVDGDTVLVEVRLTFTLN

SEQ ID NO: 2471 - protein, 161 aa, synthetic construct
GQKHTVRLLHLFRFRGNRVTEVRVVIRVVDGSEEFLQRLAELFNPDLSLEDQEAREAALLAEWEALRGSGPPSLSEEQIRQFLRRFYEALDSGDADTAASLFHPGVTIHLWDGVTFTSREEFREWFERLFSTSKDAWREILRLEVDGDTVLVEVLLTFTLN

SEQ ID NO: 2472 - protein, 161 aa, synthetic construct
GQKHVVRLAHLFRFRGNRVTEVRVVITVEDGSEEFLEVLAKLFNPNFTLENQEARLQELLDEWAARRGTGPPSLSEEQIRQFLRRFYEALDSGDADTAASLFHPGVTIHLWDGVTFTSREEFREWFERLFSTSKDAWREIERLEVDGDTVLVEVRLEFTLN

SEQ ID NO: 2473 - protein, 161 aa, synthetic construct
GQKHRVRLVHLFRFRGNRVTEVRVEIVLVDGSEEFLEVLAKLFNPDFSAEGQEERRAALLAEWEARRGSGPPSLSEEQIRQFLRRFYEALDSGDADTAASLFHPGVTIHLWDGVTFTSREEFREWFERLFSTSKDAWRRIRRLEVDGDTVLVEVELEFTLN

SEQ ID NO: 2474 - protein, 161 aa, synthetic construct
GQKHTVRLVHLFEFRGNRVTEVRVEILVVDGSSEYLEVLAKLFNPNLSEENQEARVAALLAEWRARRGSGPPSLSEEQIRQFLRRFYEALDSGDADTAASLFHPGVTIHLWDGVTFTSREEFREWFERLFSTSKDAWRRITRLEVDGDTVLVEVELEFTLN

SEQ ID NO: 2475 - protein, 161 aa, synthetic construct
GQKHRVRLLHLFRFRGNRVTEVRVVIRVVDGSQEFLDVLSELFNPDLSLDDQDAREAALLAEWEARRGSGPPSLSEEQIRQFLRRFYEALDSGDADTAASLFHPGVTIHLWDGVTFTSREEFREWFERLFSTSKDAWRRITRLEVDGDTVLVEVELEFTLN

SEQ ID NO: 2476 - protein, 161 aa, synthetic construct
GQKHVVRLVHLFRFRGNRVTEVRVVIEVVDGSQDFLEVLGKLFNPDFSLENQQERRAALLAEWEALRGSGPPSLSEEQIRQFLRRFYEALDSGDADTAASLFHPGVTIHLWDGVTFTSREEFREWFERLFSTSKDAWRRIERLEVDGDTVLVEVTLEFTLN

SEQ ID NO: 2477 - protein, 161 aa, synthetic construct
GQKHVVRLAHLFRFRGNRVTEVRVVIVLEEGSEEFLEVLGKLFNPNVTREGQEERLAALLAEWEALRGSGPPSLSEEQIRQFLRRFYEALDSGDADTAASLFHPGVTIHLWDGVTFTSREEFREWFERLFSTSKDAWREIEELEVDGDTVLVRVRLEFTLN

SEQ ID NO: 2478 - protein, 161 aa, synthetic construct
GQKHEVELVHLFRFRGNRVTEVRVEIVVVDGSEDFLELLSKLFNPNLSLENQEERRAALLARWEAERGSGPPSLSEEQIRQFLRRFYEALDSGDADTAASLFHPGVTIHLWDGVTFTSREEFREWFERLFSTSKDAWREIEALEVDGDTVLVRVRLTFTLN

SEQ ID NO: 2479 - protein, 161 aa, synthetic construct
GQKHVVELVHLFVFRGNRVTEVRVEITLVDGSEEYLKVLAELFNPDFSLENQEERRAALLAEWEARRGSGPPSLSEEQIRQFLRRFYEALDSGDADTAASLFHPGVTIHLWDGVTFTSREEFREWFERLFSTSKDAWREIEELRVDGDTVLVRVRLEFTLN

SEQ ID NO: 2480 - protein, 162 aa, synthetic construct
GQKHTVVLTHVFEFRGNRVTRVRVVIVPVPDPDEATRLAAAERALAAAGVPADRRAALLALLRAGEREHFGPSAIPEEQIRQFLRRFYEALDSGDADTAASLFHPGVTIHLWDGVTFTSREEFREWFERLFSTSKDAWREILALVVDGDTVVVVVRLDFTLN

SEQ ID NO: 2481 - protein, 162 aa, synthetic construct
GQKHTVVLVHRFVFRGNRVTEVRVVIVPVPDPDEETILAAVREALEAAGVPEELRRRALELLERGEREYFGPSSIPEEQIRQFLRRFYEALDSGDADTAASLFHPGVTIHLWDGVTFTSREEFREWFERLFSTSKDAWREILALVVEGDTVVVVVRLEFTLN

SEQ ID NO: 2482 - protein, 162 aa, synthetic construct
GQKHTVVLVHVFEFRGNRVTRVRVEIVPVPNPDEETLLAAAREALERAGVPEEMREAALRLIEAGETEYFGPSSIPEEQIRQFLRRFYEALDSGDADTAASLFHPGVTIHLWDGVTFTSREEFREWFERLFSTSKDAWREILALVVRGDTVVVVVRLDFTLN

SEQ ID NO: 2483 - protein, 162 aa, synthetic construct
GQKHVVVLCHVFEFRGNRVTRVRVVIVPVPSPDDETLLAAARRALEEAGVPPEMRAALLELLERGEREHFGPSSIPEEQIRQFLRRFYEALDSGDADTAASLFHPGVTIHLWDGVTFTSREEFREWFERLFSTSKDAWREILALVVRGDTVAVLVRLEFTLN

SEQ ID NO: 2484 - protein, 162 aa, synthetic construct
GQKHTVVLVHVFEFRGNRVTRVRVEIVPVPDPDEATVRAAVAEALERAGVPPALRERALALLAAGRRYHAGPSTIPEEQIRQFLRRFYEALDSGDADTAASLFHPGVTIHLWDGVTFTSREEFREWFERLFSTSKDAWREILALVVEGDTVVVVVRLTFTLN

SEQ ID NO: 2485 - protein, 162 aa, synthetic construct
GQKHTVVLCHVFEFRGNRVTRVRVEIVPVPNPDEATVRAAVAEALERAGVPPAMRERALALLEAGETEHFGPSTIPEEQIRQFLRRFYEALDSGDADTAASLFHPGVTIHLWDGVTFTSREEFREWFERLFSTSKDAWREILALVVDGDTVVVVVRLEFTLN

SEQ ID NO: 2486 - protein, 162 aa, synthetic construct
GQKHTVVLVHVFRFRGNRVTEVRVEIVPVPDPSEESRLAAAREALERAGVPAELRAAALALIEAGERERFGPSTIPEEQIRQFLRRFYEALDSGDADTAASLFHPGVTIHLWDGVTFTSREEFREWFERLFSTSKDAWREILALVVDGDTVVVVVELTFTLN

SEQ ID NO: 2487 - protein, 162 aa, synthetic construct
GQKHTVVLVHRFEFRGNRVTEVRVEIVPVPDPSEPAVLAAVEEGLERVGAPEELRRAALELLRAGERELFGPSTIPEEQIRQFLRRFYEALDSGDADTAASLFHPGVTIHLWDGVTFTSREEFREWFERLFSTSKDAWREILALVVRGDTVVVVVRLDFTLN

SEQ ID NO: 2488 - protein, 162 aa, synthetic construct
GQKHTVILCHVFRFRGNRVTEVRVVIVPVPNPDRETQLAAAREALERAGVPEEMRRALLELLEAGKTELFGPSSIPEEQIRQFLRRFYEALDSGDADTAASLFHPGVTIHLWDGVTFTSREEFREWFERLFSTSKDAWREILALVVRGDTVAVVVRLEFTLN

SEQ ID NO: 2489 - protein, 162 aa, synthetic construct
GQKHTVVLAHLFRFRGNRVTEVRVVIVPVPDPSDETVLAAVREALERVGAPPRLREAALELIEAGETERFEPSSIPEEQIRQFLRRFYEALDSGDADTAASLFHPGVTIHLWDGVTFTSREEFREWFERLFSTSKDAWREILALVVEGDTVVVVVRLTFTLN

SEQ ID NO: 2490 - protein, 162 aa, synthetic construct
GQKHTVVLVHVFEFRGNRVTRVRVVIVPVPDPDEATVLAAVREALEAAGVPAAMRAAALALLEAGETERFGPSTIPEEQIRQFLRRFYEALDSGDADTAASLFHPGVTIHLWDGVTFTSREEFREWFERLFSTSKDAWREILALVVEGDTVVVVVKLTFTLN

SEQ ID NO: 2491 - protein, 162 aa, synthetic construct
GQKHTVVLVHRFRFRGNRVTEVEVVIVPVPDPDEATVLAAVRAALEAAGVPAELRAAALALLEAGEREAFGPSTIPEEQIRQFLRRFYEALDSGDADTAASLFHPGVTIHLWDGVTFTSREEFREWFERLFSTSKDAWREILALVVRGDTVVVVVRLTFTLN

SEQ ID NO: 2492 - protein, 162 aa, synthetic construct
GQKHTVVLTHVFRFRGNRVTEVRVEIVPVPDPSEETRLAAAEEALARAGVPEDMREAALRLLEAGEREHFEPSTIPEEQIRQFLRRFYEALDSGDADTAASLFHPGVTIHLWDGVTFTSREEFREWFERLFSTSKDAWREILALVVRGDTVVVVVRLTFTLN

SEQ ID NO: 2493 - protein, 162 aa, synthetic construct
GQKHTVILTHVFRFRGNRVTEVRVEIVPVPDPDEETRLAAAREALERAGVPEEMRRAALELLERGERELFRPSAIPEEQIRQFLRRFYEALDSGDADTAASLFHPGVTIHLWDGVTFTSREEFREWFERLFSTSKDAWREILALVVDGDTVVVVVRLDFTLN

SEQ ID NO: 2494 - protein, 162 aa, synthetic construct
GQKHTVVLVHVFEFRGNRVTRVRVVIVPVPNPDEETVLEAVEKALEEAGVPESMRERALKLIREGKRYHAGPSTIPEEQIRQFLRRFYEALDSGDADTAASLFHPGVTIHLWDGVTFTSREEFREWFERLFSTSKDAWREILALVVEGDTVVVVVRLTFTLN

SEQ ID NO: 2495 - protein, 162 aa, synthetic construct
GQKHTVVLTHVFEFRGNRVTRVRVVIVPVPDPSEETLLAAAERALEAAGVPERAREALLELIRRGEREFFLPSSIPEEQIRQFLRRFYEALDSGDADTAASLFHPGVTIHLWDGVTFTSREEFREWFERLFSTSKDAWREILALYVDGDTVVVVVRLTFTLN

SEQ ID NO: 2496 - protein, 162 aa, synthetic construct
GQKHTVVLTHVFRFRGNRVTEVRVEIVPVPDPDDATVLAAVREALERAGVPEELRAAALALLEAGETEYFAESTIPEEQIRQFLRRFYEALDSGDADTAASLFHPGVTIHLWDGVTFTSREEFREWFERLFSTSKDAWREILALVVRGDTVVVVVRLTFTLN

SEQ ID NO: 2497 - protein, 162 aa, synthetic construct
GQKHTVVLTHVFEFRGNRVTRVRVEIVPVPDPDEATRLAAAREALERAGVPPEMRAAALALLEAGRREHFGPSTIPEEQIRQFLRRFYEALDSGDADTAASLFHPGVTIHLWDGVTFTSREEFREWFERLFSTSKDAWREIEALVVRGDTVVVVVTLTFTLN

SEQ ID NO: 2498 - protein, 162 aa, synthetic construct
GQKHTVVLVHVFEFRGNRVTRVRVVIVPVPDPSEEEIRRAVAEALERAGVPERMRRKALELLERGETEYFEESSIPEEQIRQFLRRFYEALDSGDADTAASLFHPGVTIHLWDGVTFTSREEFREWFERLFSTSKDAWRRILALVVEGDTVVVVVLLEFTLN

SEQ ID NO: 2499 - protein, 162 aa, synthetic construct
GQKHTVVLAHLFEFRGNRVTAVRVVIVPVPDPDEATVLAAVAEALEAVGAPERLRRAALELLRAGRTEFFEPSAIPEEQIRQFLRRFYEALDSGDADTAASLFHPGVTIHLWDGVTFTSREEFREWFERLFSTSKDAWREILSLVVEGDTVVVVVRLDFTLN

SEQ ID NO: 2500 - protein, 163 aa, synthetic construct
GQKHLVVLAHLFRFRGNRVTEVRVVIVEVRSPEELPAALEEAVRRMAELSDPALLEAALAALAAPGFVTTVEPGSISEEQIRQFLRRFYEALDSGDADTAASLFHPGVTIHLWDGVTFTSREEFREWFERLFSTSKDAWRRIEALVVRGDTVLVVVVLEFTLN

SEQ ID NO: 2501 - protein, 163 aa, synthetic construct
GQKHLVALAHLFRFRGNRVTEVRVVIVEVESEEELPAALREAVERMAELGTPALRDAALELLAAPGFRTVVRPGAISEEQIRQFLRRFYEALDSGDADTAASLFHPGVTIHLWDGVTFTSREEFREWFERLFSTSKDAWRRIEALVVDGDTVLVVVVLEFTLN

SEQ ID NO: 2502 - protein, 163 aa, synthetic construct
GQKHLVVLAHLFRFRGNRVTEVRVVIVEVESEAELPQAKLEALDRMAELGTPELRAAARELLAAPGFRTRVEPGSISEEQIRQFLRRFYEALDSGDADTAASLFHPGVTIHLWDGVTFTSREEFREWFERLFSTSKDAWRRIVTLVVLGDTVLVVVELEFTLN

SEQ ID NO: 2503 - protein, 163 aa, synthetic construct
GQKHLVVLAHLFRFRGNRVTEVRVVIVEVESPEQLPQALAEALARMAELGDAALHDAAAALLAAPGFREVVTPGSISEEQIRQFLRRFYEALDSGDADTAASLFHPGVTIHLWDGVTFTSREEFREWFERLFSTSKDAWRRIVALVVDGDTVLVLVELEFTLN

SEQ ID NO: 2504 - protein, 163 aa, synthetic construct
GQKHLVVLAHVFRFRGNRVTEVRVVIVEVESPEELPEALRRAVREAARLSTPALEAAMLELLAAPGFRTVVTPGSISEEQIRQFLRRFYEALDSGDADTAASLFHPGVTIHLWDGVTFTSREEFREWFERLFSTSKDAWREIRALVVDGDTVLVVVVLEFTLN

SEQ ID NO: 2505 - protein, 163 aa, synthetic construct
GQKHLVALAHIFRFRGNRVTEVRVVIVEVKSEEELPEALRRALERAAELGTPELREAGLALLEAPGFREVVTPGSISEEQIRQFLRRFYEALDSGDADTAASLFHPGVTIHLWDGVTFTSREEFREWFERLFSTSKDAWRRIETLVVDGDTVLVVVVLEFTLN

SEQ ID NO: 2506 - protein, 163 aa, synthetic construct
GQKHLVVLAHLFRFRGNRVTEVRVVIVDVRSEEELPAAEREALARAAELGDPRLLEAGAALLAAPGFRTVVEPGSISEEQIRQFLRRFYEALDSGDADTAASLFHPGVTIHLWDGVTFTSREEFREWFERLFSTSKDAWREIRALVVLGDTVLVVVRLEFTLN

SEQ ID NO: 2507 - protein, 163 aa, synthetic construct
GQKHLVVLAHLFRFRGNRVTEVRVVIVEVESEEELPEALLRAAERMAELGTAPLLEAARALLAAPGFRTVVTPGSISEEQIRQFLRRFYEALDSGDADTAASLFHPGVTIHLWDGVTFTSREEFREWFERLFSTSKDAWREIVTLVVDGDTVLVVVRLTFTLN

SEQ ID NO: 2508 - protein, 163 aa, synthetic construct
GQKHLVALAHLFRFRGNRVTEVRVVIVEVESEEELPAALLRAVERMGELGTPELLEAARRLLAEPGFRTVVRPGAISEEQIRQFLRRFYEALDSGDADTAASLFHPGVTIHLWDGVTFTSREEFREWFERLFSTSKDAWREIVTLVVDGDTVLVVVRLEFTLN

SEQ ID NO: 2509 - protein, 163 aa, synthetic construct
GQKHLVVLAHLFEFRGNRVTEVRVVIVEVRSEAELPAAKLEAVRRMAELGTPELEEDMTALLAAPGFREVVYPGSISEEQIRQFLRRFYEALDSGDADTAASLFHPGVTIHLWDGVTFTSREEFREWFERLFSTSKDAWREIVALVVRGDTVLVVVELHFTLN

SEQ ID NO: 2510 - protein, 163 aa, synthetic construct
GQKHLVALAHVFRFRGNRVTEVRVVIVEVRSPEELPQALLEAVRRAAELSDEELLRAMTELLQAPGFRTVVTPGSISEEQIRQFLRRFYEALDSGDADTAASLFHPGVTIHLWDGVTFTSREEFREWFERLFSTSKDAWRRIEALVVRGDTVLVVVVLEFTLN

SEQ ID NO: 2511 - protein, 163 aa, synthetic construct
GQKHLVVLAHLFRFRGNRVTEVRVVIVEVASPEELPEARLEALRRMGELGTPELLEAGERLLREPGFREVVTPGSISEEQIRQFLRRFYEALDSGDADTAASLFHPGVTIHLWDGVTFTSREEFREWFERLFSTSKDAWRRIETLVVDGDTVLVVVTLEFTLN

SEQ ID NO: 2512 - protein, 163 aa, synthetic construct
GQKHLVVLTHVFEFRGNRVTEVRVVIVEVESEEELPAALREALERAGELSTPEALALGRELLARPGFVTVVTPGSISEEQIRQFLRRFYEALDSGDADTAASLFHPGVTIHLWDGVTFTSREEFREWFERLFSTSKDAWREIVALVVLGDTVTVVVKLEFTLN

SEQ ID NO: 2513 - protein, 163 aa, synthetic construct
GQKHLVVLAHLFEFRGNRVTEVRVVIVEVKSPEELPQAKLEAADRMGELGTPALLAAMRALLAAPGFRTVVTPGSISEEQIRQFLRRFYEALDSGDADTAASLFHPGVTIHLWDGVTFTSREEFREWFERLFSTSKDAWRRIDALVVDGDTVAVVVTLEFTLN

SEQ ID NO: 2514 - protein, 163 aa, synthetic construct
GQKHLVALAHLFRFRGNRVTEVRVVIVEVESPAALPAARRAAVARAGELGTPELLAAATALLAAPGFRTVVRPGSISEEQIRQFLRRFYEALDSGDADTAASLFHPGVTIHLWDGVTFTSREEFREWFERLFSTSKDAWRRILALVVLGDTVLVVVELEFTLN

SEQ ID NO: 2515 - protein, 163 aa, synthetic construct
GQKHLVVLAHLFRFRGNRVTEVRVVIVEVESPEELPEAKVRAAERMGELGTPELLEAMLALLAAPGFRTVVRPGSISEEQIRQFLRRFYEALDSGDADTAASLFHPGVTIHLWDGVTFTSREEFREWFERLFSTSKDAWRRIVALVVDGDTVAVVVELEFTLN

SEQ ID NO: 2516 - protein, 163 aa, synthetic construct
GQKHLVVLAHIFEFRGNRVTEVRVVIEEVESPEELPAAKRRAAERAGELGDERLLRAALELLAAPGFRTVVTPGSISEEQIRQFLRRFYEALDSGDADTAASLFHPGVTIHLWDGVTFTSREEFREWFERLFSTSKDAWRRIVTLVVDGDTVLVVVELEFTLN

SEQ ID NO: 2517 - protein, 163 aa, synthetic construct
GQKHLVALAHLFRFRGNRVTEVRVVIVEVESPEALPAAELEAVRRMAELGTAPLLEAATRLLAEPGFVTVVTPGSISEEQIRQFLRRFYEALDSGDADTAASLFHPGVTIHLWDGVTFTSREEFREWFERLFSTSKDAWREIRALVVDGDTVLVVVVLEFTLN

SEQ ID NO: 2518 - protein, 163 aa, synthetic construct
GQKHLVVLAHVFRFRGNRVTEVRVVIVEVESEEALPAALREAVARAAELSDEALLAAATALLAAPGFRTVVRPGSISEEQIRQFLRRFYEALDSGDADTAASLFHPGVTIHLWDGVTFTSREEFREWFERLFSTSKDAWRRIVTLVVDGDTVLVVVVLEFTLN

SEQ ID NO: 2519 - protein, 163 aa, synthetic construct
GQKHLVALAHLFEFRGNRVTEVRVVIVEVESPEALPAARLAAVDRAAELGDPALRAAARANLAAPGFVTTVTPGSISEEQIRQFLRRFYEALDSGDADTAASLFHPGVTIHLWDGVTFTSREEFREWFERLFSTSKDAWRRILTLVVDGDTVLVVVELEFTLN

SEQ ID NO: 2520 - protein, 164 aa, synthetic construct
GQKHVVVLVHVFRFRGNRVTEVRVEIIEVENEEEAERLAEELKEYLENLEERLGEDKPIFGLLGELLEEARGPPPQISEEQIRQFLRRFYEALDSGDADTAASLFHPGVTIHLWDGVTFTSREEFREWFERLFSTSKDAWREIVDLRVVGDTVIVVVKLTFTLN

SEQ ID NO: 2521 - protein, 164 aa, synthetic construct
GQKHYVVLVHIFRFRGNRVTEVHVLIEEVENEEEAERLAEEWRRLLERLEEELGRRRPWLGLLRELLERARGPPAEISEEQIRQFLRRFYEALDSGDADTAASLFHPGVTIHLWDGVTFTSREEFREWFERLFSTSKDAWREIVALRVEGDTVVVVVRLSFTLN

SEQ ID NO: 2522 - protein, 164 aa, synthetic construct
GQKHYVVLVHVFRFRGNRVTEVDVFIIEVENEEEAEELAERLVRLLERLAEEADRYTPILGHLRRLLEEAEGPPPEISEEQIRQFLRRFYEALDSGDADTAASLFHPGVTIHLWDGVTFTSREEFREWFERLFSTSKDAWREIVALRVVGDTVIVVVKLTFTLN

SEQ ID NO: 2523 - protein, 164 aa, synthetic construct
GQKHYVVLVHVFRFRGNRVTEVRVFIEEVENEEEAEKRAAYYKELLANLAERLGEDTPVLGALAALRAEAAGPPPEISEEQIRQFLRRFYEALDSGDADTAASLFHPGVTIHLWDGVTFTSREEFREWFERLFSTSKDAWREIVALRVEGDTVIVVVKLSFTLN

SEQ ID NO: 2524 - protein, 164 aa, synthetic construct
GQKHYVVLVHIFEFRGNRVTRVEVFIIEVENEEEAEKLAEELKEHLENLEETLDENKPIFGRIKELLERARGPPAEISEEQIRQFLRRFYEALDSGDADTAASLFHPGVTIHLWDGVTFTSREEFREWFERLFSTSKDAWREIVALRVEGDTVIVVVKLEFTLN

SEQ ID NO: 2525 - protein, 164 aa, synthetic construct
GQKHYVVLVHIFVFRGNRVTEVRVHIEEVDNREEAEERAEEYKERLAHLAERAGEDKPIFGTIAALRAEAAGPPAEISEEQIRQFLRRFYEALDSGDADTAASLFHPGVTIHLWDGVTFTSREEFREWFERLFSTSKDAWREIVALRVEGDTVIVVVVLEFTLN

SEQ ID NO: 2526 - protein, 164 aa, synthetic construct
GQKHYVVLVHVFVFRGNRVTEVWVKIIEVENEEEAKELAELLKELLENLDERAGEYTPILGLLRELRERAEGPPPEISEEQIRQFLRRFYEALDSGDADTAASLFHPGVTIHLWDGVTFTSREEFREWFERLFSTSKDAWREIVALEVRGDTVIVVVVLSFTLN

SEQ ID NO: 2527 - protein, 164 aa, synthetic construct
GQKHYVVLVHVFRFRGNRVTEVRVFIIEVENEEEAEKLAEKLKEYLENLEEKWGEEKPIFGALKELMEEARGPPPQISEEQIRQFLRRFYEALDSGDADTAASLFHPGVTIHLWDGVTFTSREEFREWFERLFSTSKDAWRRIVDLRVEGDTVIVVVVLEFTLN

SEQ ID NO: 2528 - protein, 164 aa, synthetic construct
GQKHYVVLVHVFRFRGNRVTEVRVFIIEVENEEEAEELAEKLKEYLENLEERLDEYKPIFGYLKELLEEARGPPPEISEEQIRQFLRRFYEALDSGDADTAASLFHPGVTIHLWDGVTFTSREEFREWFERLFSTSKDAWREIVDLRVEGDTVIVVVKLSFTLN

SEQ ID NO: 2529 - protein, 164 aa, synthetic construct
GQKHYVVLVHVFRFRGNRVTEVHVWIEEVKDEAEAERRAEEYRHWLEHLEETLGERTPVGGLLGELLERARGPPAEISEEQIRQFLRRFYEALDSGDADTAASLFHPGVTIHLWDGVTFTSREEFREWFERLFSTSKDAWREIVALRVRGDTVIVVVRLSFTLN

SEQ ID NO: 2530 - protein, 164 aa, synthetic construct
GQKHYVVLVHVFRFRGNRVTEVHVFIIEVENEEEAERLAEELKRLLENLEEELDKNKPILGRLKELLEEARGPPPEISEEQIRQFLRRFYEALDSGDADTAASLFHPGVTIHLWDGVTFTSREEFREWFERLFSTSKDAWREIVALRVIGDTVIVVVKLSFTLN

SEQ ID NO: 2531 - protein, 164 aa, synthetic construct
GQKHYVVLVHIFRFRGNRVTEVRVHIIEVENEEEAKKLAEELKELLENLEEELDKNTPILGTIRELLEEARGPPPEISEEQIRQFLRRFYEALDSGDADTAASLFHPGVTIHLWDGVTFTSREEFREWFERLFSTSKDAWRRIVALRVLGDTVIVVVVLEFTLN

SEQ ID NO: 2532 - protein, 164 aa, synthetic construct
GQKHYVVLVHVFVFRGNRVTEVRVKIIEVENEAEAEELAAELVELLENLEETLGEYEPILGLLRELLERARGPPPEISEEQIRQFLRRFYEALDSGDADTAASLFHPGVTIHLWDGVTFTSREEFREWFERLFSTSKDAWREIVALRVEGDTVVVVVRLSFTLN

SEQ ID NO: 2533 - protein, 164 aa, synthetic construct
GQKHYVVLTHVFRFRGNRVTEVHVFIEEVKNEEEAEKLAEEKRELLETLEERLDEDKPWLGLLGALLAEAAGPPAEISEEQIRQFLRRFYEALDSGDADTAASLFHPGVTIHLWDGVTFTSREEFREWFERLFSTSKDAWREIVALRVVGDTVIVVVKLSFTLN

SEQ ID NO: 2534 - protein, 164 aa, synthetic construct
GQKHYVVLVHVFRFRGNRVTEVHVHIIEVENEEEAKKLAEELKELLEHLAERAGERTPILGLLAALRAEAAGPPAEISEEQIRQFLRRFYEALDSGDADTAASLFHPGVTIHLWDGVTFTSREEFREWFERLFSTSKDAWREIVALRVEGDTVVVVVVLKFTLN

SEQ ID NO: 2535 - protein, 164 aa, synthetic construct
GQKHYVVLVHVFRFRGNRVTEVRVKIIEVENEEEAERLAKELVDRLERLDETADEDRPILGLLRELREAARGPPPEISEEQIRQFLRRFYEALDSGDADTAASLFHPGVTIHLWDGVTFTSREEFREWFERLFSTSKDAWREIVALRVEGDTVIVVVKLSFTLN

SEQ ID NO: 2536 - protein, 164 aa, synthetic construct
GQKHYVVLVHVFRFRGNRVTEVHVLIEEVENEEEAEKLAELYKEYLENLEETLGEDRPWGGLLGEILAEARGPPAQISEEQIRQFLRRFYEALDSGDADTAASLFHPGVTIHLWDGVTFTSREEFREWFERLFSTSKDAWRRIVALRVEGDTVIVVVVLSFTLN

SEQ ID NO: 2537 - protein, 164 aa, synthetic construct
GQKHYVVLVHVFRFRGNRVTEVRVRIIEVENEEEAEKLAEELKERLEHLDETLGEERPIFGLLRELRERAAGPPAEISEEQIRQFLRRFYEALDSGDADTAASLFHPGVTIHLWDGVTFTSREEFREWFERLFSTSKDAWREIVALRVEGDTVVVVVKLSFTLN

SEQ ID NO: 2538 - protein, 164 aa, synthetic construct
GQKHYVVLVHIFRFRGNRVTEVDVYIEEVENEEEAEELAERYKELLENLEEELDKEKPILGLIKERLAEARGPPPEISEEQIRQFLRRFYEALDSGDADTAASLFHPGVTIHLWDGVTFTSREEFREWFERLFSTSKDAWREIVDLRVVGDTVIVVVKLEFTLN

SEQ ID NO: 2539 - protein, 164 aa, synthetic construct
GQKHYVVLTHVFVFRGNRVTEVRVWIEEVENEAEAERLAERRRALLADFDRAAGEDAPVLGELARLAARAAGPPAEISEEQIRQFLRRFYEALDSGDADTAASLFHPGVTIHLWDGVTFTSREEFREWFERLFSTSKDAWRRIVALEVRGDTVVVVVVLSFTLN

SEQ ID NO: 2540 - protein, 165 aa, synthetic construct
GQKHVVALLHRFRFRGNRVTEVEVVIVELPSEEEARRWAERAREEAKVLYTGFTDVPPLAAAVAALREVEARAGRPSISEEQIRQFLRRFYEALDSGDADTAASLFHPGVTIHLWDGVTFTSREEFREWFERLFSTSKDAWREIVALRVVGDTVLVFVLLRFTLN

SEQ ID NO: 2541 - protein, 165 aa, synthetic construct
GQKHVVALLHTFRFRGNRVTEVRVVIEELPNEEEAEKWKERAKEEAKTWFTGFTDRPPFAEAVAEWKEIAATAGSPSISEEQIRQFLRRFYEALDSGDADTAASLFHPGVTIHLWDGVTFTSREEFREWFERLFSTSKDAWREIVALRVVGDTVLVFVILKFTLN

SEQ ID NO: 2542 - protein, 165 aa, synthetic construct
GQKHVVALLHEFRFRGNRVTEVRVVILDLPSAEEAARLAAAVREEAATWFTGLTEFPPFAAAVAELRAIFATAGNPTISEEQIRQFLRRFYEALDSGDADTAASLFHPGVTIHLWDGVTFTSREEFREWFERLFSTSKDAWREIVALRVVGDTVLVFVLLEFTLN

SEQ ID NO: 2543 - protein, 165 aa, synthetic construct
GQKHVVALLHRFRFRGNRVTEVEVVIVELPDEAAAEEWAERARAEAETLFTGFTDVPPFAEAVARWKEIAAKAGNPSISEEQIRQFLRRFYEALDSGDADTAASLFHPGVTIHLWDGVTFTSREEFREWFERLFSTSKDAWRRIVALRVVGDTVLVFVILEFTLN

SEQ ID NO: 2544 - protein, 165 aa, synthetic construct
GQKHVVALLHLFRFRGNRVTEVEVVIVPLPNEAEAEKWEEEAKEEAKTLFEGFKERPPFAEAVAALKEIFAKAGNPSISEEQIRQFLRRFYEALDSGDADTAASLFHPGVTIHLWDGVTFTSREEFREWFERLFSTSKDAWRRIVALRVFGDTVLVLVVLEFTLN

SEQ ID NO: 2545 - protein, 165 aa, synthetic construct
GQKHVVALLHVFRFRGNRVTEVRVVIVELPSEEEAERLREEAKEEAKTLFTGFTHRPPFAAAIAELKEIFAKAGNPSISEEQIRQFLRRFYEALDSGDADTAASLFHPGVTIHLWDGVTFTSREEFREWFERLFSTSKDAWREIVALTVFGDTVLVFVVLTFTLN

SEQ ID NO: 2546 - protein, 165 aa, synthetic construct
GQKHVVALLHTFRFRGNRVTEVRVVILELPNEAEAEELAARAREEAATLFTGWTEFPPFAAAVAALREEFARAGRPSISEEQIRQFLRRFYEALDSGDADTAASLFHPGVTIHLWDGVTFTSREEFREWFERLFSTSKDAWRRIVALRVVGDTVAVFVILEFTLN

SEQ ID NO: 2547 - protein, 165 aa, synthetic construct
GQKHVVALLHTFEFRGNRVTRVEVVIVELPNEEEAEKLEKEIKEEAKTWFTGFTDIPPFAEAVARQKEIAAKAGNPSISEEQIRQFLRRFYEALDSGDADTAASLFHPGVTIHLWDGVTFTSREEFREWFERLFSTSKDAWRRIVALRVVGDTVFVFVILTFTLN

SEQ ID NO: 2548 - protein, 165 aa, synthetic construct
GQKHVVALLHTFRFRGNRVTEVRVVIVELPSAEEAERWEAAARREAEVLFEGFTDVPPFAEAVAELREIAATAGNPQISEEQIRQFLRRFYEALDSGDADTAASLFHPGVTIHLWDGVTFTSREEFREWFERLFSTSKDAWRRIVALRVFGDTVLVFVVLEFTLN

SEQ ID NO: 2549 - protein, 165 aa, synthetic construct
GQKHVVALLHVFRFRGNRVTEVEVVIVDLESEEEAERLAEEIKREAEVWFEGLKDIPPFAEAIARLRELFAEAGAPEISEEQIRQFLRRFYEALDSGDADTAASLFHPGVTIHLWDGVTFTSREEFREWFERLFSTSKDAWREIVALRVEGDTVLVFVILKFTLN

SEQ ID NO: 2550 - protein, 165 aa, synthetic construct
GQKHVVALLHLFRFRGNRVTEVRVVIEELESEEEAERLAEEAKEEAKTLFTGFRHRPPFAEFIAEAREIFARAGAPSISEEQIRQFLRRFYEALDSGDADTAASLFHPGVTIHLWDGVTFTSREEFREWFERLFSTSKDAWRHIVSLRVVGDTVLVEVVLEFTLN

SEQ ID NO: 2551 - protein, 165 aa, synthetic construct
GQKHVVALLHRFVFRGNRVTEVEVVILDLPSEEEAEKLAKEIKEEAKTLFTGFKRYPPFAEFVARLKEIAAKAGHPSISEEQIRQFLRRFYEALDSGDADTAASLFHPGVTIHLWDGVTFTSREEFREWFERLFSTSKDAWREIVALRVFGDTVFVWVILTFTLN

SEQ ID NO: 2552 - protein, 165 aa, synthetic construct
GQKHVVALLHVFRFRGNRVTEVEVVIVELPSAEEAERLAARAKEEAAVLFEGFTDIPPFAEAVARLREIAAEAGAPSISEEQIRQFLRRFYEALDSGDADTAASLFHPGVTIHLWDGVTFTSREEFREWFERLFSTSKDAWRHIVSLRVVGDTVAVFVVLEFTLN

SEQ ID NO: 2553 - protein, 165 aa, synthetic construct
GQKHVVALLHVFRFRGNRVTEVRVVIHELPSEAEAERWAAAARAEAATWFTGFTDVPPFAAAVAELAELAAKAGAPSISEEQIRQFLRRFYEALDSGDADTAASLFHPGVTIHLWDGVTFTSREEFREWFERLFSTSKDAWREIVALRVFGDTVVVFVLLTFTLN

SEQ ID NO: 2554 - protein, 165 aa, synthetic construct
GQKHVVALLHRFRFRGNRVTEVEVVILPLPDEAEAERLAERARAEAAVGYTGFTEYPPFAEAVARLREVDAKAGRPSISEEQIRQFLRRFYEALDSGDADTAASLFHPGVTIHLWDGVTFTSREEFREWFERLFSTSKDAWRRIVALRVVGDTVEVWVLLEFTLN

SEQ ID NO: 2555 - protein, 165 aa, synthetic construct
GQKHVVALLHRFRFRGNRVTEVEVVILELPNEEEAEKLKKEAKEEAKVLFTGFKHYPPFAAAVAEAAEVFATAGNPSISEEQIRQFLRRFYEALDSGDADTAASLFHPGVTIHLWDGVTFTSREEFREWFERLFSTSKDAWREIVALRVVGDTVLVFVILKFTLN

SEQ ID NO: 2556 - protein, 165 aa, synthetic construct
GQKHVVALLHRFRFRGNRVTEVEVVIHDLPDEAEAERLAAAARAEAATWFAGFTEFPPFAEAVARLREIAAAAGRPSISEEQIRQFLRRFYEALDSGDADTAASLFHPGVTIHLWDGVTFTSREEFREWFERLFSTSKDAWRRIVALRVVGDTVVVFVLLTFTLN

SEQ ID NO: 2557 - protein, 165 aa, synthetic construct
GQKHVVALLHRFVFRGNRVTEVEVVIVELPDEAEAERERERARAEAATLFTGWTDRPPFAAAVAELKEIFAKAGNPSISEEQIRQFLRRFYEALDSGDADTAASLFHPGVTIHLWDGVTFTSREEFREWFERLFSTSKDAWREIVSLTVVGDTVLVRVVLTFTLN

SEQ ID NO: 2558 - protein, 165 aa, synthetic construct
GQKHVVALLHLFRFRGNRVTEVRVVILELPDEAEAAELAARARAEAETLFTGWTEFPPLAAFVAELREIFATAGRPSISEEQIRQFLRRFYEALDSGDADTAASLFHPGVTIHLWDGVTFTSREEFREWFERLFSTSKDAWREIVSLRVVGDTVLVEVVLRFTLN

SEQ ID NO: 2559 - protein, 165 aa, synthetic construct
GQKHVVALLHTFRFRGNRVTEVEVVILELKDEAEAEELAKEAKEEAKTWFTGFKRYPPFAEAVARLKEVAAKAGRPSISEEQIRQFLRRFYEALDSGDADTAASLFHPGVTIHLWDGVTFTSREEFREWFERLFSTSKDAWRRIVALRVFGDTVVVFVILEFTLN

SEQ ID NO: 2560 - protein, 166 aa, synthetic construct
GQKHWVFLAHVFWFRGNRVTRVEVEILEVPNEEELKRLEEEAKEELETGRELFEKYKDVFSRIAELWEEMEAAGGRREISEEQIRQFLRRFYEALDSGDADTAASLFHPGVTIHLWDGVTFTSREEFREWFERLFSTSKDAWRHIVALRVVGDTVIVLVALEFTLN

SEQ ID NO: 2561 - protein, 166 aa, synthetic construct
GQKHWVLLAHVFRFRGNRVTEVHVEILDVPDEATARRLAEEVRRELETGRELFLRHRDVFARVAELLDRMEAEGGEREISEEQIRQFLRRFYEALDSGDADTAASLFHPGVTIHLWDGVTFTSREEFREWFERLFSTSKDAWRRIVALRVVGDTVLVVVVLEFTLN

SEQ ID NO: 2562 - protein, 166 aa, synthetic construct
GQKHWVALAHYFRFRGNRVTEVHVEILEVPNEAELEELKERFKAELETGGELFREHADVFARIAALWEEMEAAGGRREISEEQIRQFLRRFYEALDSGDADTAASLFHPGVTIHLWDGVTFTSREEFREWFERLFSTSKDAWREIVALRVVGDTVLVRVALKFTLN

SEQ ID NO: 2563 - protein, 166 aa, synthetic construct
GQKHYVFLVHYFRFRGNRVTEVVVRILEVENEEELEEIEELAKEDLETGRELFEKFADVFAEIAELEERAIAEGGEREISEEQIRQFLRRFYEALDSGDADTAASLFHPGVTIHLWDGVTFTSREEFREWFERLFSTSKDAWRHIVALRVYGDTVIVYVSLSFTLN

SEQ ID NO: 2564 - protein, 166 aa, synthetic construct
GQKHYVFLVHVFFFRGNRVTEVHVEILEVKNKEELEKIEEEAKEDLKTGKELFRKYKEVFSRVAELEDRIEAAGGAREISEEQIRQFLRRFYEALDSGDADTAASLFHPGVTIHLWDGVTFTSREEFREWFERLFSTSKDAWRRIVALRVVGDTVLVVVSLEFTLN

SEQ ID NO: 2565 - protein, 166 aa, synthetic construct
GQKHYVFLVHYFRFRGNRVTEVRVAILEVPDEEELERIKKEVIEELETGGELFRKYAEVLAEIAELWEEARAAGGRREISEEQIRQFLRRFYEALDSGDADTAASLFHPGVTIHLWDGVTFTSREEFREWFERLFSTSKDAWREIVALEVFGDTVIVYVALRFTLN

SEQ ID NO: 2566 - protein, 166 aa, synthetic construct
GQKHWVVLVHVFRFRGNRVTEVVVRILEVPNRAAAEELAARAREDLATGRALFREHADVFSEIAELWVEVEASGGRREISEEQIRQFLRRFYEALDSGDADTAASLFHPGVTIHLWDGVTFTSREEFREWFERLFSTSKDAWRRIVALDVRGDTVIVVVVLEFTLN

SEQ ID NO: 2567 - protein, 166 aa, synthetic construct
GQKHWVFLVHDFRFRGNRVTEVVVRILELPDEAAAEEVAAAARADLATGRELERRHGEVLSEVAALLDRMEAEGGAREISEEQIRQFLRRFYEALDSGDADTAASLFHPGVTIHLWDGVTFTSREEFREWFERLFSTSKDAWREIVALEVRGDTVRVWVRLRFTLN

SEQ ID NO: 2568 - protein, 166 aa, synthetic construct
GQKHWVFLAHYFRFRGNRVTEVRVEILELPNEEELERIEEAARADLETGRALFREHADVFASIAELWDELEAAGGRREISEEQIRQFLRRFYEALDSGDADTAASLFHPGVTIHLWDGVTFTSREEFREWFERLFSTSKDAWRRIVALVVRGDTVLVVVALEFTLN

SEQ ID NO: 2569 - protein, 166 aa, synthetic construct
GQKHYVFLAHYFRFRGNRVTEVVVRILEVKDEEELEKLKELAKKELETGKELFKEYSDVFSEIAELWEEVEASGGRREISEEQIRQFLRRFYEALDSGDADTAASLFHPGVTIHLWDGVTFTSREEFREWFERLFSTSKDAWREIVALKVVGDTVIVLVALKFTLN

SEQ ID NO: 2570 - protein, 166 aa, synthetic construct
GQKHVVFLAHYFRFRGNRVTEVHVRILELPDRAEAERIAAEVRAELATGGALFRRHADVFAEMAALWEEMEAAGGRREISEEQIRQFLRRFYEALDSGDADTAASLFHPGVTIHLWDGVTFTSREEFREWFERLFSTSKDAWRRIVALRVVGDTVLVAVVLEFTLN

SEQ ID NO: 2571 - protein, 166 aa, synthetic construct
GQKHYVFLAHYFRFRGNRVTEVVVEILEVENEEELEELAERAKAELETGGELFRELSDVFSRMAALWDEMRAAGGAREISEEQIRQFLRRFYEALDSGDADTAASLFHPGVTIHLWDGVTFTSREEFREWFERLFSTSKDAWREIVALEVRGDTVLVLVRLRFTLN

SEQ ID NO: 2572 - protein, 166 aa, synthetic construct
GQKHYVFLAHYFRFRGNRVTEVRVAIYEVENEEELEELKERVKEELETGRELEEELSDVFSEIAELLDRMEAEGGRREISEEQIRQFLRRFYEALDSGDADTAASLFHPGVTIHLWDGVTFTSREEFREWFERLFSTSKDAWREIVALRVVGDTVVVYVSLSFTLN

SEQ ID NO: 2573 - protein, 166 aa, synthetic construct
GQKHWVYLAHYFRFRGNRVTEVRVAILELKDEAELKEIEERVKEDLETGRELFEELSDVFSEIAALEEEMEAEGGRREISEEQIRQFLRRFYEALDSGDADTAASLFHPGVTIHLWDGVTFTSREEFREWFERLFSTSKDAWRHIVALRVRGDTVLVRVALEFTLN

SEQ ID NO: 2574 - protein, 166 aa, synthetic construct
GQKHYVYLAHYFRFRGNRVTHVEVRILEVANRAELEELKARARAELETGRELYREHADVFSRIAELEEEMEAAGGRREISEEQIRQFLRRFYEALDSGDADTAASLFHPGVTIHLWDGVTFTSREEFREWFERLFSTSKDAWREIVALRVVGDTVLVEVALEFTLN

SEQ ID NO: 2575 - protein, 166 aa, synthetic construct
GQKHYVFLAHYFRFRGNRVTEVHVEILELPNEEELEEIAKRAKEDLLTGRKLFEELKDVFSRMAELEEEMLARGGRREISEEQIRQFLRRFYEALDSGDADTAASLFHPGVTIHLWDGVTFTSREEFREWFERLFSTSKDAWREIVALRVVGDTVLVLVRLSFTLN

SEQ ID NO: 2576 - protein, 166 aa, synthetic construct
GQKHYVLLAHYFRFRGNRVTHVEVEILEVENEEELERLAERAKAELETGRTLFREYGDVFSRIAELWDEMEAEGGEREISEEQIRQFLRRFYEALDSGDADTAASLFHPGVTIHLWDGVTFTSREEFREWFERLFSTSKDAWREIVALRVVGDTVLVVVRLSFTLN

SEQ ID NO: 2577 - protein, 166 aa, synthetic construct
GQKHYVFLVHVFWFRGNRVTEVVVRIVEVADEAELDRLAALAKEDLKTGKELFERLRDVLSEIAELWDRMEAEGGEREISEEQIRQFLRRFYEALDSGDADTAASLFHPGVTIHLWDGVTFTSREEFREWFERLFSTSKDAWREIVALKVVGDTVIVVVRLSFTLN

SEQ ID NO: 2578 - protein, 166 aa, synthetic construct
GQKHWVFLAHVFFFRGNRVTEVHVRILELENREEAEKIAEEAKAELETGGELFEKYADVFAEVAELWREVEARGGEREISEEQIRQFLRRFYEALDSGDADTAASLFHPGVTIHLWDGVTFTSREEFREWFERLFSTSKDAWRRIVALRVVGDTVIVLVVLEFTLN

SEQ ID NO: 2579 - protein, 166 aa, synthetic construct
GQKHWVFLVHYFRFRGNRVTEVEVEILELKNKEEMEEIKEEAKKELETGRELFLKYKDVFSRMAELWDRAEAEGGEREISEEQIRQFLRRFYEALDSGDADTAASLFHPGVTIHLWDGVTFTSREEFREWFERLFSTSKDAWREIVALRVVGDTVIVVVALEFTLN

SEQ ID NO: 2580 - protein, 167 aa, synthetic construct
GQKHYVVLVHVFRFRGNRVTEVRVMIIPVENREEAEKVAEEFKRILDNLGELFDSLGVNEPWLQEVRRLALEARTRAPSLSEEQIRQFLRRFYEALDSGDADTAASLFHPGVTIHLWDGVTFTSREEFREWFERLFSTSKDAWRRIVALRVVGDTVIVVVVLEFTLN

SEQ ID NO: 2581 - protein, 167 aa, synthetic construct
GQKHYVVLVHLFRFRGNRVTEVRVMIIEVENREEAKRLAEKFKRILENAGELFDELGLNKPWMEAIRNEWLAAKTRAASLSEEQIRQFLRRFYEALDSGDADTAASLFHPGVTIHLWDGVTFTSREEFREWFERLFSTSKDAWREIVALRVEGDTVLVVVVLEFTLN

SEQ ID NO: 2582 - protein, 167 aa, synthetic construct
GQKHYVVLVHVFRFRGNRVTEVEVMIIPVKDEEEAKRLAEEFKEILENLGKLFDKLGLNKEWMERVYRIALEARTRAPSLSEEQIRQFLRRFYEALDSGDADTAASLFHPGVTIHLWDGVTFTSREEFREWFERLFSTSKDAWREIVDLRVVGDTVIVVVVLKFTLN

SEQ ID NO: 2583 - protein, 167 aa, synthetic construct
GQKHYVVLIHVFRFRGNRVTEVEVVIFPVENEAEAEELAERFRRILANRGELFDELGLNEPWLQRVHEIWLEAQTRAPSLSEEQIRQFLRRFYEALDSGDADTAASLFHPGVTIHLWDGVTFTSREEFREWFERLFSTSKDAWRRIEALEVVGDTVIVVVVLSFTLN

SEQ ID NO: 2584 - protein, 167 aa, synthetic construct
GQKHYVVLVHVFRFRGNRVTEVRVMIIPVENEEEAKELAEKFKRILENLGELFDELGYNKEWMDEVREIALEAKTRPATLSEEQIRQFLRRFYEALDSGDADTAASLFHPGVTIHLWDGVTFTSREEFREWFERLFSTSKDAWREIVALRVVGDTVIVVVVLSFTLN

SEQ ID NO: 2585 - protein, 167 aa, synthetic construct
GQKHYVVLVHVFRFRGNRVTEVYVMIIPVKNEEEAEKLAEEFKRILEHLGELFDELGYNAPWMERIREIMLEARTRPPTLSEEQIRQFLRRFYEALDSGDADTAASLFHPGVTIHLWDGVTFTSREEFREWFERLFSTSKDAWRRIVDLRVVGDTVLVVVVLKFTLN

SEQ ID NO: 2586 - protein, 167 aa, synthetic construct
GQKHYVVLVHLFRFRGNRVTEVEVMIIPVENEEEAERVAERFRRILEHLGELFDELGVNEPWMKRLRERALAARTRAPTLSEEQIRQFLRRFYEALDSGDADTAASLFHPGVTIHLWDGVTFTSREEFREWFERLFSTSKDAWREIVALRVVGDTVIVVVKLSFTLN

SEQ ID NO: 2587 - protein, 167 aa, synthetic construct
GQKHYVVLVHLFRFRGNRVTEVEVMIIPVENEEEAERVAARFREILDNLGELFDELGENEEWLRRLYERWLEARTRPATLSEEQIRQFLRRFYEALDSGDADTAASLFHPGVTIHLWDGVTFTSREEFREWFERLFSTSKDAWREIVALRVVGDTVLVVVKLSFTLN

SEQ ID NO: 2588 - protein, 167 aa, synthetic construct
GQKHYVVLIHVFRFRGNRVTEVRVMIIPVKNREEAEELAEKYKRILENLGELFDELGLNEEWEKEILEIWKEAKTRAPTLSEEQIRQFLRRFYEALDSGDADTAASLFHPGVTIHLWDGVTFTSREEFREWFERLFSTSKDAWRRIVALKVVGDTVLVVVVLEFTLN

SEQ ID NO: 2589 - protein, 167 aa, synthetic construct
GQKHYVVLVHVFRFRGNRVTEVRVMIIPVENEEEAEEVAERFKRILENAGELFDELGVNEEWMRWVYELWLEARTRAPTLSEEQIRQFLRRFYEALDSGDADTAASLFHPGVTIHLWDGVTFTSREEFREWFERLFSTSKDAWREIVALRVVGDTVIVVVKLSFTLN

SEQ ID NO: 2590 - protein, 167 aa, synthetic construct
GQKHYVVLVHVFRFRGNRVTEVWVMIIPVENEAEAEELAARFRRILDELGRLWDELGLNAPWLERLHALALEAAARPPTLSEEQIRQFLRRFYEALDSGDADTAASLFHPGVTIHLWDGVTFTSREEFREWFERLFSTSKDAWRRIVALRVVGDTVYVVVVLEFTLN

SEQ ID NO: 2591 - protein, 167 aa, synthetic construct
GQKHYVVLVHVFVFRGNRVTEVRVMIIPVENREEAERLAERFRRILENIGELFDELGLNEEQMKEIYDLAQEAKTRAPTLSEEQIRQFLRRFYEALDSGDADTAASLFHPGVTIHLWDGVTFTSREEFREWFERLFSTSKDAWRRIVDLRVIGDTVIVVVVLEFTLN

SEQ ID NO: 2592 - protein, 167 aa, synthetic construct
GQKHYVVLVHVFRFRGNRVTEVRVMIEEVENREEAEELAEKYKEILDNLGELLDELGINKEWQEWLYELVLEAKTREPTLSEEQIRQFLRRFYEALDSGDADTAASLFHPGVTIHLWDGVTFTSREEFREWFERLFSTSKDAWRRIVALRVIGDTVVVVVVLEFTLN

SEQ ID NO: 2593 - protein, 167 aa, synthetic construct
GQKHYVVLVHLFRFRGNRVTEVRVLIIPVENREEAEELAERLRRILERLGELLDELGYGEEWWRWIREEMLAARTRAPSLSEEQIRQFLRRFYEALDSGDADTAASLFHPGVTIHLWDGVTFTSREEFREWFERLFSTSKDAWRRIVALRVVGDTVLVAVVLEFTLN

SEQ ID NO: 2594 - protein, 167 aa, synthetic construct
GQKHYVVLIHVFRFRGNRVTEVRVLIIPVENREEAEELAELFREILERLGELFHRLGLNAPWLEWVHELALRAKERPPTLSEEQIRQFLRRFYEALDSGDADTAASLFHPGVTIHLWDGVTFTSREEFREWFERLFSTSKDAWRRIVALRVVGDTVYVVVVLEFTLN

SEQ ID NO: 2595 - protein, 167 aa, synthetic construct
GQKHYVVLVHVFRFRGNRVTEVRVMIIEVENEEEAEEIAEKFKEILENMGEKFDELGKNEEWMKEIREIMLKARTRKPTLSEEQIRQFLRRFYEALDSGDADTAASLFHPGVTIHLWDGVTFTSREEFREWFERLFSTSKDAWREIVALKVVGDTVVVVVKLSFTLN

SEQ ID NO: 2596 - protein, 167 aa, synthetic construct
GQKHYVVLIHVFIFRGNRVTEVYVMIIEVENEEEAEELAEKFKEILENLGEKFDELGVNEEWLKRIKEIWLEAKTREATLSEEQIRQFLRRFYEALDSGDADTAASLFHPGVTIHLWDGVTFTSREEFREWFERLFSTSKDAWREIVDLKVVGDTVIVVVKLSFTLN

SEQ ID NO: 2597 - protein, 167 aa, synthetic construct
GQKHYVVLVHVFRFRGNRVTEVRVMIEEVENREEAEKLAERWKRIVENLGELLDELGLNEEWEREIREIWLEARTRAPTLSEEQIRQFLRRFYEALDSGDADTAASLFHPGVTIHLWDGVTFTSREEFREWFERLFSTSKDAWRRIVHLRVVGDTVVVVVVLEFTLN

SEQ ID NO: 2598 - protein, 167 aa, synthetic construct
GQKHYVVLVHVFRFRGNRVTEVRVMIEEVEDREEAEKLAERYREILENLGELLDELGLNEEWEKEIRELWLEAKSREPTLSEEQIRQFLRRFYEALDSGDADTAASLFHPGVTIHLWDGVTFTSREEFREWFERLFSTSKDAWREIVALKVVGDTVVVVVVLEFTLN

SEQ ID NO: 2599 - protein, 167 aa, synthetic construct
GQKHYVVLIHVFRFRGNRVTEVYVLIVPVENREEAERLAAQFRELLDRAGELFDALGLQAPWLERIRALWLEARGRRATLSEEQIRQFLRRFYEALDSGDADTAASLFHPGVTIHLWDGVTFTSREEFREWFERLFSTSKDAWRRIVALRVVGDTVLVVVVLEFTLN

SEQ ID NO: 2600 - protein, 118 aa, synthetic construct; identical to SEQ ID NO: 2

SEQ ID NO: 2601 - protein, 117 aa, synthetic construct
MSEEQIRQNLRRFYEALDSGDADTAASLFHPGVTIHLWDGVTFTSREEFREWFERLFSTSKDALREIKSLEVRGDTVEVHVQLHFTRNGQKHTVDLTHLFHFRGNRVDEVRVYINPT

SEQ ID NO: 2602 - protein, 118 aa, synthetic construct; identical to SEQ ID NO: 128

SEQ ID NO: 2603 - protein, 118 aa, synthetic construct; identical to SEQ ID NO: 104

SEQ ID NO: 2604 - protein, 118 aa, synthetic construct; identical to SEQ ID NO: 128

SEQ ID NO: 2605 - protein, 44 aa, synthetic construct
MSEEQIRQFLRRFYEALDSGDADTAASLFHPGVTIHLWDGVTFT

SEQ ID NO: 2606 - protein, 76 aa, synthetic construct
SREEFREWFERLFSTSKDAWREIKSLEVRGDTVEVHVQLHFTLNGQKHTVDLTHHFHFRGNRVTEVRVHINPTGLE

SEQ ID NO: 2607 - protein, 46 aa, synthetic construct
DTVEVHVQLHFTLNGQKHTVDLTHHFHFRGNRVTEVRVHINPTGLE

SEQ ID NO: 2608 - protein, 74 aa, synthetic construct
MSEEQIRQFLRRFYEALDSGDADTAASLFHPGVTIHLWDGVTFTSREEFREWFERLFSTSKDAWREIKSLEVRG

SEQ ID NO: 2609 - protein, 16 aa, synthetic construct
NRVTEVRVHINPTGLE

SEQ ID NO: 2610 - protein, 104 aa, synthetic construct
MSEEQIRQFLRRFYEALDSGDADTAASLFHPGVTIHLWDGVTFTSREEFREWFERLFSTSKDAWREIKSLEVRGDTVEVHVQLHFTLNGQKHTVDLTHHFHFRG

SEQ ID NO: 2611 - protein, 120 aa, synthetic construct
PSISEEQIRQNLRRFYEALDSGDADTAASLFHPGVTIHLWDGVTFTSREEFREWFERLFSTSKDALREIVELRVRGDTVVVVVVLHFTRNGQKHVVVLVHLWHFRGNRVDEVRVEIIPAP

SEQ ID NO: 2612 - protein, 142 aa, synthetic construct
DGVTFTSREEFREWFERLFSTSKDALREIVELRVRGDTVVVVVVLHFTRNGQKHVVVLVHTWRFRGNRVDEVRVEIIPAPSLDEESIEARVAEARRLAEERLAELGDPPPSISEEQIRQNLRRFYEALDSGDADTAASLFHP

SEQ ID NO: 2613 - protein, 143 aa, synthetic construct
SREEFREWFERLFSTSKDALREIVELRVRGDTVVVVVVLHFTRNGQKHVVVLVHTWRFRGNRVDEVRVEIIPAPSLDEESIEARVAEARRLAEERLAELGDPPPSISEEQIRQNLRRFYEALDSGDADTAASLFHPGVTIHLW

SEQ ID NO: 2614 - protein, 102 aa, synthetic construct
SEEQIRQNLRRFYEALDSGDADTAASLFHPGVTIHLWDGVTFTSREEFREWFERLFSTSKDALREIKSLEVRGDTVEVHVQLHFTRNGQKHTVDLTHLFHFR

SEQ ID NO: 2615 - protein, 11 aa, synthetic construct
NRVDEVRVYIN

SEQ ID NO: 2616 - protein, 13 aa, synthetic construct
NRVDEVRVYINPT

SEQ ID NO: 2617 - protein, 16 aa, synthetic construct
GQKHVVVLVHTFRFRG

SEQ ID NO: 2618 - protein, 133 aa, synthetic construct
NRVTEVRVEIIPAPSLDEESIEARVAEARRLAEERLAELGDPPPSISEEQIRQFLRRFYEALDSGDADTAASLFHPGVTIHLWDGVTFTSREEFREWFERLFSTSKDAWREIVELRVRGDTVVVVVVLHFTLN

SEQ ID NO: 2619 - protein, 14 aa, synthetic construct
NRVTEVRVEIIPAP

SEQ ID NO: 2620 - protein, 135 aa, synthetic construct
SLDEESIEARVAEARRLAEERLAELGDPPPSISEEQIRQFLRRFYEALDSGDADTAASLFHPGVTIHLWDGVTFTSREEFREWFERLFSTSKDAWREIVELRVRGDTVVVVVVLHFTLNGQKHVVVLVHTFRFRG

SEQ ID NO: 2621 - protein, 29 aa, synthetic construct
SLDEESIEARVAEARRLAEERLAELGDPP

SEQ ID NO: 2622 - protein, 120 aa, synthetic construct
PSISEEQIRQFLRRFYEALDSGDADTAASLFHPGVTIHLWDGVTFTSREEFREWFERLFSTSKDAWREIVELRVRGDTVVVVVVLHFTLNGQKHVVVLVHTFRFRGNRVTEVRVEIIPAP

SEQ ID NO: 2623 - protein, 22 aa, synthetic construct
PSISEEQIRQFLRRFYEALDSG

SEQ ID NO: 2624 - protein, 127 aa, synthetic construct
DADTAASLFHPGVTIHLWDGVTFTSREEFREWFERLFSTSKDAWREIVELRVRGDTVVVVVVLHFTLNGQKHVVVLVHTFRFRGNRVTEVRVEIIPAPSLDEESIEARVAEARRLAEERLAELGDPP

SEQ ID NO: 2625 - protein, 11 aa, synthetic construct
DADTAASLFHP

SEQ ID NO: 2626 - protein, 138 aa, synthetic construct
GVTIHLWDGVTFTSREEFREWFERLFSTSKDAWREIVELRVRGDTVVVVVVLHFTLNGQKHVVVLVHTFRFRGNRVTEVRVEIIPAPSLDEESIEARVAEARRLAEERLAELGDPPPSISEEQIRQFLRRFYEALDSG

SEQ ID NO: 2627 - protein, 7 aa, synthetic construct
GVTIHLW

SEQ ID NO: 2628 - protein, 142 aa, synthetic construct
DGVTFTSREEFREWFERLFSTSKDAWREIVELRVRGDTVVVVVVLHFTLNGQKHVVVLVHTFRFRGNRVTEVRVEIIPAPSLDEESIEARVAEARRLAEERLAELGDPPPSISEEQIRQFLRRFYEALDSGDADTAASLFHP

SEQ ID NO: 2629 - protein, 6 aa, synthetic construct
DGVTFT

SEQ ID NO: 2630 - protein, 143 aa, synthetic construct
SREEFREWFERLFSTSKDAWREIVELRVRGDTVVVVVVLHFTLNGQKHVVVLVHTFRFRGNRVTEVRVEIIPAPSLDEESIEARVAEARRLAEERLAELGDPPPSISEEQIRQFLRRFYEALDSGDADTAASLFHPGVTIHLW

SEQ ID NO: 2631 - protein, 17 aa, synthetic construct
SREEFREWFERLFSTSK

SEQ ID NO: 2632 - protein, 132 aa, synthetic construct
DAWREIVELRVRGDTVVVVVVLHFTLNGQKHVVVLVHTFRFRGNRVTEVRVEIIPAPSLDEESIEARVAEARRLAEERLAELGDPPPSISEEQIRQFLRRFYEALDSGDADTAASLFHPGVTIHLWDGVTFT

SEQ ID NO: 2633 - protein, 13 aa, synthetic construct
DAWREIVELRVRG

SEQ ID NO: 2634 - protein, 136 aa, synthetic construct
DTVVVVVVLHFTLNGQKHVVVLVHTFRFRGNRVTEVRVEIIPAPSLDEESIEARVAEARRLAEERLAELGDPPPSISEEQIRQFLRRFYEALDSGDADTAASLFHPGVTIHLWDGVTFTSREEFREWFERLFSTSK

SEQ ID NO: 2635 - protein, 14 aa, synthetic construct
DTVVVVVVLHFTLN

SEQ ID NO: 2636 - protein, 135 aa, synthetic construct
GQKHVVVLVHTFRFRGNRVTEVRVEIIPAPSLDEESIEARVAEARRLAEERLAELGDPPPSISEEQIRQFLRRFYEALDSGDADTAASLFHPGVTIHLWDGVTFTSREEFREWFERLFSTSKDAWREIVELRVRG

SEQ ID NO: 2637 - protein, 16 aa, synthetic construct
MSGNRVDEVRVYINPT

SEQ ID NO: 2638 - protein, 19 aa, synthetic construct
MSGGERREVELTHLFTFRG

SEQ ID NO: 2639 - protein, 90 aa, synthetic construct
MSGSDAERAALLDRFYAALNAGDADAAAALFPPGVTIELWNGVVFRSREEFRAWFAELFARSPEARREVLSREIEGDRVRVRVRLTFVRD

SEQ ID NO: 2640 - protein, 16 aa, synthetic construct
MSGNRVVDVRVYTNPT

SEQ ID NO: 2641 - protein, 19 aa, synthetic construct
MSGGQKHTVDLLQLFKFVG

SEQ ID NO: 2642 - protein, 9 aa, synthetic construct
MSGVYTNPT

SEQ ID NO: 2643 - protein, 11 aa, synthetic construct
MSGVRVYTNPT

SEQ ID NO: 2644 - protein, 13 aa, synthetic construct
MSGVDVRVYTNPT

SEQ ID NO: 2645 - protein, 15 aa, synthetic construct
MSGRVVDVRVYTNPT

SEQ ID NO: 2646 - protein, 16 aa, synthetic construct
MSGNRVVDVRVYTNPT

SEQ ID NO: 2647 - protein, 16 aa, synthetic construct
MSGNRVVDARVYTNPT

SEQ ID NO: 2648 - protein, 16 aa, synthetic construct
MSGNRVVDVRVYTEPT

SEQ ID NO: 2649 - protein, 16 aa, synthetic construct
MSGNRVVDARVYTEPT

SEQ ID NO: 2650 - protein, 17 aa, synthetic construct
MSGGNRVVDVRVYTNPT

SEQ ID NO: 2651 - protein, 19 aa, synthetic construct
MSGFVGNRVVDVRVYTNPT

SEQ ID NO: 2652 - protein, 21 aa, synthetic construct
MSGFKFVGNRVVDVRVYTNPT

SEQ ID NO: 2653 - protein, 23 aa, synthetic construct
MSGQLFKFVGNRVVDVRVYTNPT

SEQ ID NO: 2654 - protein, 25 aa, synthetic construct
MSGLLQLFKFVGNRVVDVRVYTNPT

SEQ ID NO: 2655 - protein, 31 aa, synthetic construct
MSGQKHTVDLLQLFKFVGNRVVDVRVYTNPT

SEQ ID NO: 2656 - protein, 111 aa, synthetic construct
MSGSEEQIRQNLRRFYEALDSGDADTAASLFDPGVTITLWDGTTFTSVEEFREWFERLFSTSKDALREIKSLEVRGDTVEVTVQLSFTRNGQKHTVDLLQLFKFVGNRVVD

SEQ ID NO: 2657 - protein, 109 aa, synthetic construct
MSGSEEQIRQNLRRFYEALDSGDADTAASLFDPGVTITLWDGTTFTSVEEFREWFERLFSTSKDALREIKSLEVRGDTVEVTVQLSFTRNGQKHTVDLLQLFKFVGNRV

SEQ ID NO: 2658 - protein, 107 aa, synthetic construct
MSGSEEQIRQNLRRFYEALDSGDADTAASLFDPGVTITLWDGTTFTSVEEFREWFERLFSTSKDALREIKSLEVRGDTVEVTVQLSFTRNGQKHTVDLLQLFKFVGN

SEQ ID NO: 2659 - protein, 106 aa, synthetic construct
MSGSEEQIRQNLRRFYEALDSGDADTAASLFDPGVTITLWDGTTFTSVEEFREWFERLFSTSKDALREIKSLEVRGDTVEVTVQLSFTRNGQKHTVDLLQLFKFVG

SEQ ID NO: 2660 - protein, 105 aa, synthetic construct
MSGSEEQIRQNLRRFYEALDSGDADTAASLFDPGVTITLWDGTTFTSVEEFREWFERLFSTSKDALREIKSLEVRGDTVEVTVQLSFTRNGQKHTVDLLQLFKFV

SEQ ID NO: 2661 - protein, 103 aa, synthetic construct
MSGSEEQIRQNLRRFYEALDSGDADTAASLFDPGVTITLWDGTTFTSVEEFREWFERLFSTSKDALREIKSLEVRGDTVEVTVQLSFTRNGQKHTVDLLQLFK

SEQ ID NO: 2662 - protein, 101 aa, synthetic construct
MSGSEEQIRQNLRRFYEALDSGDADTAASLFDPGVTITLWDGTTFTSVEEFREWFERLFSTSKDALREIKSLEVRGDTVEVTVQLSFTRNGQKHTVDLLQL

SEQ ID NO: 2663 - protein, 118 aa, synthetic construct
MSEEQIRQFLRRFYEALDSGDADTAASSFHPHVTIHLWDGVTFTSREEFREWFERRFSTSKDAWREIKSLEVRGDTVEVHVKLHLTDNGQKHTVDLTHHYHFRGNRVDEVRVYINPTG

SEQ ID NO: 2664 - protein, 149 aa, synthetic construct
GQKHVVVLVHTFRFRGNRVTEVRVEIIPAPSLDEESIEARVAEARRLAEERLAELGDPPPSISEEQIRQNLRRFYEALDSGDADTAASLFHPGVTIHLWDGVTFTSREEFREWFERLFSTSKDALREIKSLEVRGDTVVVVVVLHFTRN

SEQ ID NO: 2665 - protein, 118 aa, synthetic construct
MSEEQIRQELRRFYEALDRGDADTAASLFHPQVTIHLWDGVTFTSREEFREWFERRFSTSKDANREIKSLEVRGDTVEVHVQLHFTHNGQKHTVDLTHLFHFRGNRVNEVRVYINPTG

SEQ ID NO: 2666 - protein, 91 aa, synthetic construct
MSGSEEQIRQNLRRFYEALDSGDADTAASLFDPGVTITLWDGTTFTSVEEFREWFERLFSTSKDALREIKSLEVRGDTVEVTVQLSFTRNG

SEQ ID NO: 2667 - protein, 90 aa, synthetic construct
MSGSEEQIRQNLRRFYEALDSGDADTAASLFDPGVTITLWDGTTFTSVEEFREWFERLFSTSKDALREIKSLEVRGDTVEVTVQLSFTRN

SEQ ID NO: 2668 - protein, 119 aa, synthetic construct
MSGSEEQIRQNLRRFYEALDSGDADTAASLFDPGVTITLWDGTTFTSVEEFREWFERLFSTSKDALREIKSLEVRGDTVEVTVQLSFTRNGQKHTVDLLQLFKFVGNRVVDYRVYTNPT

SEQ ID NO: 2669 - protein, 119 aa, synthetic construct
MSGSEEQIRQNLRRFYEALDSGDADTAASLFDPGVTITLWDGTTFTSVEEFREWFERLFSTSKDALREIKSLEVRGDTVEVTVQLSFTRNGQKHTVDLLQLFKFVGNRVVDRRVYTNPT

SEQ ID NO: 2670 - protein, 119 aa, synthetic construct
MSGSEEQIRQNLRRFYEALDSGDADTAASLFDPGVTITLWDGTTFTSVEEFREWFERLFSTSKDALREIKSLEVRGDTVEVTVQLSFTRNGQKHTVDLLQLFKFVGNRVVDMRVYTNPT

SEQ ID NO: 2671 - protein, 119 aa, synthetic construct
MSGSEEQIRQNLRRFYEALDSGDADTAASLFDPGVTITLWDGTTFTSVEEFREWFERLFSTSKDALREIKSLEVRGDTVEVTVQLSFTRNGQKHTVDLLQLFKFVGNRVVDDRVYTNPT

SEQ ID NO: 2672 - protein, 16 aa, synthetic construct
MSGNRVDEVRVYINPT

SEQ ID NO: 2673 - protein, 19 aa, synthetic construct
MSGGQKHTVDLTHLFHFRG

SEQ ID NO: 2674 - protein, 90 aa, synthetic construct
MSGSEEQIRQNLRRFYEALDSGDADTAASLFHPGVTIHLWDGVTFTSREEFREWFERLFSTSKDALREIKSLEVRGDTVEVHVQLHFTRN

SEQ ID NO: 2675 - protein, 102 aa, synthetic construct
SEEQIRQNLRRFYEALDSGDAITAASLFDPGVTITLWDGTTFTSVEEFREWFESQFSTSKDALREISSLEVRGDTVEVTVRLSFTRNGQKHTVDLLQLFKFV

SEQ ID NO: 2676 - protein, 12 aa, synthetic construct
RVVAVRVYVNPT

SEQ ID NO: 2677 - protein, 102 aa, synthetic construct
SEEQIRQNLRRFYEALDSGDADTAASLFDPGVTITLWDGVTFTSREEFREWFERQFSTSKDALREIKSLEVRGDTVEVTIQLSFTRNGQKSTVDLTQLFRFR

SEQ ID NO: 2678 - protein, 12 aa, synthetic construct
RVDEVRVYINPT

SEQ ID NO: 2679 - protein, 99 aa, synthetic construct
MSGSEEQIRQNLRRFYEALDSGDADTAASLFDPGVTITLWDGTTFTSVEEFREWFERLFSTSKDALREIKSLEVRGDTVEVTVQLSFTRNGQKHTVDLL

SEQ ID NO: 2680 - protein, 97 aa, synthetic construct
MSGSEEQIRQNLRRFYEALDSGDADTAASLFDPGVTITLWDGTTFTSVEEFREWFERLFSTSKDALREIKSLEVRGDTVEVTVQLSFTRNGQKHTVD

SEQ ID NO: 2681 - protein, 95 aa, synthetic construct
MSGSEEQIRQNLRRFYEALDSGDADTAASLFDPGVTITLWDGTTFTSVEEFREWFERLFSTSKDALREIKSLEVRGDTVEVTVQLSFTRNGQKHT

SEQ ID NO: 2682 - protein, 118 aa, synthetic construct
MSEEQIRQNLRRFYEALDSGDADTAASLFIPGVTITLWDGVTFTSREEFREWFERLFSTSKDALREIKSLEVRGDTVEVTVQLSFTRNGQKKTVDLTHLFTFRGNRVDEVRVYINPTG

SEQ ID NO: 2683 - protein, 118 aa, synthetic construct
MSEEQIRQNLRRFYEALDSGDADTAASLFAPGVTIHLWDGVTFTSREEFREWFERLFSTSKDALREIKSLEVRGDTVEVHVQLHFTRNGQKHTVDLTHLFHFRGNRVDEVRVYINPTG

SEQ ID NO: 2684 - protein, 118 aa, synthetic construct
MSEEQIRQNLRRFYEALDSGDADTAASLFDPGVTITLWDGVTFTSREEFREWFERLFSTSKDALREIKSLEVRGDTVEVTVQLSFTRNGQKKTVDLTHLFTFRGNRVDEVRVYINPTG

SEQ ID NO: 2685 - protein, 118 aa, synthetic construct
MSEEQIRQNLRRFYEALDSGDADTAASLFDPGVTITLWDGVTFTSREEFREWFERLFSTSKDALREIKSLEVRGDTVEVTVQLSFTRNGQKMTVDLTHLFTFRGNRVDEVRVYINPTG

SEQ ID NO: 2686 - protein, 118 aa, synthetic construct
MSEEQIRQNLRRFYEALDSGDADTAASLFDPGVTIHLWDGVTFTSREEFREWFERLFSTSKDALREIKSLEVRGDTVEVHVQLHFTRNGQKHTVDLTHLFHFRGNRVDEVRVYINPTG

SEQ ID NO: 2687 - protein, 118 aa, synthetic construct
MSEEQIRQNLRRFYEALDSGDADTAASLFIPGVTITLWDGVTFTSREEFREWFERLFSTSKDALREIKSLEVRGDTVEVTVQLSFTRNGQKMTVDLTHLFTFRGNRVDEVRVYINPTG

SEQ ID NO: 2688 - protein, 118 aa, synthetic construct
MSEEQIRQNLRRFYEALDSGDADTAASLFIPGVTIHLWDGVTFTSREEFREWFERLFSTSKDALREIKSLEVRGDTVEVHVQLHFTRNGQKHTVDLTHLFHFRGNRVDEVRVYINPTG

SEQ ID NO: 2689 - protein, 118 aa, synthetic construct
MSEEQIRQNLRRFYEALDSGDADTAASLFSPGVTIHLWDGVTFTSREEFREWFERLFSTSKDALREIKSLEVRGDTVEVHVQLHFTRNGQKHTVDLTHLFHFRGNRVDEVRVYINPTG

SEQ ID NO: 2690 - protein, 118 aa, synthetic construct
MSEEQIRQNLRRFYEALDSGDADTAASLFHPGVTITLWDGVTFTSREEFREWFERLFSTSKDALREIKSLEVRGDTVEVHVQLHFTRNGQKHTVDLTHLFHFRGNRVDEVRVYINPTG

SEQ ID NO: 2691 - protein, 118 aa, synthetic construct
MSEEQIRQNLRRFYEALDSGDADTAASLFHPGVTIYLWDGVTFTSREEFREWFERLFSTSKDALREIKSLEVRGDTVEVHVQLHFTRNGQKHTVDLTHLFHFRGNRVDEVRVYINPTG

SEQ ID NO: 2692 - protein, 118 aa, synthetic construct
MSEEQIRQNLRRFYEALDSGDADTAASLFHPGVTIHLWDGVTFTSREEFREWFERLFSTSKDALREIKSLEVRGDTVEVKVQLHFTRNGQKHTVDLTHLFHFRGNRVDEVRVYINPTG

SEQ ID NO: 2693 - protein, 118 aa, synthetic construct
MSEEQIRQNLRRFYEALDSGDADTAASLFHPGVTIHLWDGVTFTSREEFREWFERLFSTSKDALREIKSLEVRGDTVEVTVQLHFTRNGQKHTVDLTHLFHFRGNRVDEVRVYINPTG

SEQ ID NO: 2694 - protein, 118 aa, synthetic construct
MSEEQIRQNLRRFYEALDSGDADTAASLFHPGVTIHLWDGVTFTSREEFREWFERLFSTSKDALREIKSLEVRGDTVEVVVQLHFTRNGQKHTVDLTHLFHFRGNRVDEVRVYINPTG

SEQ ID NO: 2695 - protein, 118 aa, synthetic construct
MSEEQIRQNLRRFYEALDSGDADTAASLFHPGVTIHLWDGVTFTSREEFREWFERLFSTSKDALREIKSLEVRGDTVEVHVQLSFTRNGQKHTVDLTHLFHFRGNRVDEVRVYINPTG

SEQ ID NO: 2696 - protein, 118 aa, synthetic construct
MSEEQIRQNLRRFYEALDSGDADTAASLFHPGVTIHLWDGVTFTSREEFREWFERLFSTSKDALREIKSLEVRGDTVEVHVQLTFTRNGQKHTVDLTHLFHFRGNRVDEVRVYINPTG

SEQ ID NO: 2697 - protein, 118 aa, synthetic construct
MSEEQIRQNLRRFYEALDSGDADTAASLFHPGVTIHLWDGVTFTSREEFREWFERLFSTSKDALREIKSLEVRGDTVEVHVQLHFTRNGQKKTVDLTHLFHFRGNRVDEVRVYINPTG

SEQ ID NO: 2698 - protein, 118 aa, synthetic construct
MSEEQIRQNLRRFYEALDSGDADTAASLFHPGVTIHLWDGVTFTSREEFREWFERLFSTSKDALREIKSLEVRGDTVEVHVQLHFTRNGQKMTVDLTHLFHFRGNRVDEVRVYINPTG

SEQ ID NO: 2699 - protein, 118 aa, synthetic construct
MSEEQIRQNLRRFYEALDSGDADTAASLFHPGVTIHLWDGVTFTSREEFREWFERLFSTSKDALREIKSLEVRGDTVEVHVQLHFTRNGQKHTVDLTHLFTFRGNRVDEVRVYINPTG

SEQ ID NO: 2700 - protein, 118 aa, synthetic construct
MSEEQIRQNLRRFYEALDSGDADTAASLFSPGVTITLWDGVTFTSREEFREWFERLFSTSKDALREIKSLEVRGDTVEVVVQLTFTRNGQKKTVDLTHLFTFRGNRVDEVRVYINPTG

SEQ ID NO: 2701 - protein, 118 aa, synthetic construct
MSEEQIRQNLRRFYEALDSGDADTAASLFAPGVTIYLWDGVTFTSREEFREWFERLFSTSKDALREIKSLEVRGDTVEVKVQLTFTRNGQKKTVDLTHLFTFRGNRVDEVRVYINPTG

SEQ ID NO: 2702 - protein, 118 aa, synthetic construct
MSEEQIRQNLRRFYEALDSGDADTAASLFDPGVTITLWDGVTFTSREEFREWFERLFSTSKDALREIKSLEVRGDTVEVTVQLSFTRNGQKSTVDLTHLFRFRGNRVDEVRVYINPTG

SEQ ID NO: 2703 - protein, 118 aa, synthetic construct
MSEEQIRQNLRRFYEALDSGDADTAASLFDPGVTITLWDGVTFTSREEFREWFERLFSTSKDALREIKSLEVRGDTVEVTVQLSFTRNGQKSTVDLTQLFRFRGNRVDEVRVYINPTG

SEQ ID NO: 2704 - protein, 118 aa, synthetic construct
MSEEQIRQNLRRFYEALDSGDADTAASLFDPGVTITLWDGDTFTSREEFREWFERLFSTSKDALREIKSLEVRGDTVEVTVQLSFTRNGQKSTVDLGQLFRFRGNRVDEVRVYINPTG

SEQ ID NO: 2705 - protein, 118 aa, synthetic construct
MSDAERAALLDRFYAALNAGDADAAAALFPPGVTIELWNGVVFRSREEFRAWFAELFARSPEARREVLSREIEGDRVRVRVRLTFVRDGERREVELTHLFTFRGNRVDEVRVYINPTG

SEQ ID NO: 2706 - protein, 118 aa, synthetic construct
MSDAERAALLDRFYAALNAGDADAAAALFPPGVTIELWNGVVFRSREEFRAWFAELFARSPEARREVLSREIEGDRVRVRVRLTFVRDGERREVELTQLFTFRGNRVDEVRVYINPTG

SEQ ID NO: 2707 - protein, 118 aa, synthetic construct
MSEEQIRQNLRRFYEALDSGDADTAASLFDPGVTITLWDGTTFTSVEEFREWFERLFSTSKDALREIKSLEVRGDTVEVTVQLSFTRNGQKHTVDLLQLFKFVGNRVVEVRVYINPTG

SEQ ID NO: 2708 - protein, 118 aa, synthetic construct
MSEEQIRQNLRRFYEALDSGDADTAASLFDQGVTITLWDGVTFTSREEFREWFERQFSTSKDALREIKSLEVRGDTVEVTVQLSFTRNGQKSTVDLTQLFRFRGNRVDEVRVYINPTG

SEQ ID NO: 2709 - protein, 118 aa, synthetic construct
MSEEQIRQNLRRFYEALDSGDADTAASLFDPGVTITLWDGTTFTSVEEFREWFERLFSTSKDALREIKSLEVRGDTVEVTVQLSFTRNGQKHTVDLLQLYKFVGNRVVEVRVYINPTG

SEQ ID NO: 2710 - protein, 118 aa, synthetic construct
MSEEQIRQNLRRFYEALDSGDADTAASLFDPGVTITLWDGTTFTSVEEFREWFERLFSTSKDALREIKSLEVCGDTVEVTVQLSFTRNGQKHTVDLLQLFKFVGNRVVEVRVYINPTG

SEQ ID NO: 2711 - protein, 118 aa, synthetic construct
MSEEQIRQNLRRFYEALDSGDADTAASLFDPGVTITLWDGTTFTSVEEFREWFERLFSTSKDALREIKSLEVRGDTVEVTVQLSFTRNGQKHTVDLLQLFKFVGNRVVDVRVYTNPTG

SEQ ID NO: 2712 - protein, 118 aa, synthetic construct
MSEEQIRQDLRRFYEALDSGDADTAASLFDPGVTITLWDGVTFTSREEFREWFERQFSTSKDALREIKSLEVRGDTVEVTVQLSFTRNGQKSTVDLTQLFRFRGNRVDEVRVYINPTG

SEQ ID NO: 2713 - protein, 118 aa, synthetic construct
MSEEQIRQNLRRFYEALDSGDADTAASLFDPGVTITLWDGVTFTSREEFREWFERQFSTSKDALREIKSLEVRGDTVEVTVQLSFTRNGQKSTVDLTQLFRFRGNRVDEVRVYINPTG

SEQ ID NO: 2714 - protein, 118 aa, synthetic construct
MSEEQIRQNLRRFYEALDSGDAGTAASLFDPGVTITLWDGTTFTSVEEFREWFERQFSTSKDALREIKSLEVRGDTVEVTVQLSFTRNGQKHTVDLLQLFKFVGNRVVEVRVYINPTG

SEQ ID NO: 2715 - protein, 118 aa, synthetic construct
MSEEQIRQNLRRFYEALDSGDADTAASLFDPGVTITLWDGVTFTSREEFREWFERLFSTSKDALREIMSLEVRGDTVEVTVHLSFTRNGQKSTVDLTQLFRFRGNRVDEVRVYINPTG

SEQ ID NO: 2716 - protein, 118 aa, synthetic construct
MSEEQIRQNLRRFYEALDSGDADTAASLFDPGVTITLWDGVTFTSREEFREWFEPLFSTSKDALREIKSLEVRGDTVEVTVQLSFTRNGQKSTVDLTQLFRFRGNRVDEVRVYINPTG

SEQ ID NO: 2717 - protein, 118 aa, synthetic construct
MSEEQIRQNLRRFYEALDSGDASTAASLFDPGVTITLWDGTTFTSVEEFREWFEYNFSTSKDALREIVSLEVRGDTVEVTVRLSFTRNGQKHTVDLLQLFKFVGNRVVFVRVYDNPTG

SEQ ID NO: 2718 - protein, 118 aa, synthetic construct
MSEEQIRQNLRRFYEALDSGDARTAASLFDPGVTITLWDGTTFTSVEEFREWFEKEFSTSKDALREIVSLEVRGDTVEVTVRLSFTRNGQKHTVDLLQLFKFVGNRVVSVRVYENPTG

SEQ ID NO: 2719 - protein, 118 aa, synthetic construct
MSEEQIRQNLRRFYEALDSGDAITAASLFDPGVTITLWDGTTFTSVEEFREWFELQFSTSKDALREISSLEVRGDTVEVTVRLSFTRNGQKHTVDLLQLFKFVGNRVVAVRVYVNPTG

SEQ ID NO: 2720 - protein, 118 aa, synthetic construct
MSEEQIRQNLRSFYEALDSGDAETAASLFDPGVTITLWDGTTFTSVEEFREWFEHNFSTSKDALREITSLEVRGDTVEVTVKLSFTRNGQKHTVDLLQLYKFVGNRVVYVRVYHNPTG

SEQ ID NO: 2721 - protein, 118 aa, synthetic construct
MSEEQIRQNLRRFYEALDSGDANTAASLFDPGVTITLWDGTTFTSVEEFREWFEERFSTSKDALREIRSLEVRGDTVEVTVYLSFTRNGQKHTVDLLQLFKFVGNRVVTVRVYVNPTG

SEQ ID NO: 2722 - protein, 118 aa, synthetic construct
MSEEQIRQNLRRFYEALDSGDALTAASLFDPGVTITLWDGTTFTSVEEFREWFEVQFSTSKDALREIVSLEVRGDTVEVTVELSFTRNGQKHTVDLLQLFKFVGNRVVSVRVYWNPTG

SEQ ID NO: 2723 - protein, 118 aa, synthetic construct
MSEEQIRQNLRRFYEALDSGDAETAASLFDPGVTITLWDGTTFTSVEEFREWFEVSFSTSKDALREISSLEVRGDTVEVTVKLSFTRNGQKHTVDLLQLYKFVGNRVVDVRVYANPTG

SEQ ID NO: 2724 - protein, 118 aa, synthetic construct
MSEEQIRQNLRRFYEALDSGDAYTAASLFDPGVTITLWDGTTFTSVEEFREWFEVQFSTSKDALREILSLEVRGDTVEVTVTLSFTRNGQKHTVDLLQLFKFVGNRVVSVRVYANPTG

SEQ ID NO: 2725 - protein, 118 aa, synthetic construct
MSEEQIRQNLRRFYEALDSGDADTAASLFDPGVTITLWDGTTFTSVEEFREWFEYLFSTSKDALREITSLEVRGDTVEVTVALSFTRNGQKHTVDLLQLFKFVGNRVVFVRVYVNPTG

SEQ ID NO: 2726 - protein, 118 aa, synthetic construct
MSEEQIRQNLRRFYEALDSGDASTAASLFDPGVTITLWDGTTFTSVEEFREWFEYNFSTSKDALREIDSLEVRGDTVEVTVSLSFTRNGQKHTVDLLQLFKFVGNRVVSVRVYDNPTG

SEQ ID NO: 2727 - protein, 118 aa, synthetic construct
MSEEQIRQNLRRFYEALDSGDAWTAASLFDPGVTITLWDGTTFTSVEEFREWFENRFSTSKDALREILSLEVRGDTVEVTVKLSFTRNGQKHTVDLLQLFKFVGNRVVSVRVYDNPTG

SEQ ID NO: 2728 - protein, 118 aa, synthetic construct
MSEEQIRQNLRRFYEALDSGDATTAASLFDPGVTITLWDGTTFTSVEEFREWFEVSFSTSKDALREIRSLEVRGDTVEVTVGLSFTRNGQKHTVDLLQLFKFVGNRVVHVRVYANPTG

SEQ ID NO: 2729 - protein, 118 aa, synthetic construct
MSEEQIRQNLRRFYEALDSGDATTAASLFDPGVTITLWDGTTFTSVEEFREWFELNFSTSKDALREITSLEVRGDTVEVTVNLSFTRNGQKHTVDLLQLFKFVGNRVVSVRVYVNPTG

SEQ ID NO: 2730 - protein, 118 aa, synthetic construct
MSEEQIRQNLRRFYEALDSGDAITAASLFDPGVTITLWDGTTFTSVEEFREWFESQFSTSKDALREISSLEVRGDTVEVTVRLSFTRNGQKHTVDLLQLFKFVGNRVVAVRVYVNPTG

SEQ ID NO: 2731 - protein, 118 aa, synthetic construct
MSEEQIRQNLRRFYEALDSGDADTAASLFDPGVTITLWDGVTFTSREEFREWFERQFSTSKDALREIKSLEVRGDTVEVTIQLSFTRNGQKSTVDLTQLFRFRGNRVDEVRVYINPTG

SEQ ID NO: 2732 - protein, 118 aa, synthetic construct
MSEEQIRQNLRRFYEALDSGDAITAASLFDPGVTITLWDGTTFTSVEEFREWFGLQFSTSKDALREISSLEVRGDTVEVTVRLSFTRNGQKHTVDLLQLFKFVGNRVVAVRVYVNPTG

SEQ ID NO: 2733 - protein, 106 aa, synthetic construct
MSGMSEEQIRQNLRRFYEALDSGDAITAASLFDPGVTITLWDGTTFTSVEEFREWFESQFSTSKDALREISSLEVRGDTVEVTVRLSFTRNGQKHTVDLLQLFKFV

SEQ ID NO: 2734 - protein, 17 aa, synthetic construct
MSGGNRVVAVRVYVNPT

SEQ ID NO: 2735 - protein, 15 aa, synthetic construct
NRVDEVRVYINGSGS

SEQ ID NO: 2736 - protein, 103 aa, synthetic construct
SEEQIRQNLRRFYEALDSGDADTAASLFHPGVTIHLWDGVTFTSREEFREWFERLFSTSKDALREIKSLEVRGDTVEVHVQLHFTRNGQKHTVDLTHLFHFRG

SEQ ID NO: 2737 - protein, 120 aa, synthetic construct
MSGMSEEQIRQNLRRFYEALDSGDAITAASLFDPGVTITLWDGTTFTSVEEFREWFESQFSTSRDALREISSLEVRGDTVEVTVRLSFTRNGQRHTVDLLQLFRFVGNRVVAVRVYVNPT

SEQ ID NO: 2738 - protein, 19 aa, synthetic construct
MSEEQIRQFLRRFYEALDS

SEQ ID NO: 2739 - protein, 20 aa, synthetic construct
SISEEQIRQFLRRFYEALDS

SEQ ID NO: 2740 - protein, 19 aa, synthetic construct
IPEEQIRQFLRRFYEALDS

SEQ ID NO: 2741 - protein, 20 aa, synthetic construct
EISEEQIRQFLRRFYEALDS

SEQ ID NO: 2742 - protein, 7 aa, synthetic construct
ADTAASL

SEQ ID NO: 2743 - protein, 4 aa, synthetic construct
TIHL

SEQ ID NO: 2744 - protein, 4 aa, synthetic construct
GVTF

SEQ ID NO: 2745 - protein, 14 aa, synthetic construct
REEFREWFERLFST

SEQ ID NO: 2746 - protein, 10 aa, synthetic construct
WREIKSLEVR

SEQ ID NO: 2747 - protein, 12 aa, synthetic construct
TVEVHVQLHFTL

SEQ ID NO: 2748 - protein, 12 aa, synthetic construct
TVVVVVRLDFTL

SEQ ID NO: 2749 - protein, 14 aa, synthetic construct
QKHTVDLTHHFHFR

SEQ ID NO: 2750 - protein, 14 aa, synthetic construct
QKHTVILTHVFRFR

SEQ ID NO: 2751 - protein, 13 aa, synthetic construct
RVTEVRVHINPTG

SEQ ID NO: 2752 - protein, 12 aa, synthetic construct
RVTEVRVEIVPV

SEQ ID NO: 2753 - protein, 118 aa, synthetic construct
MSEEQIRQNLRRFYEALDSGDAITAASLFDPGVTITLWDGTTFTSVEEFREWFESQFSTSKDALREISSLEVRGDTVEVTVRLSFTRNGQKHTVELLQLFKFVGNRVVAVRVYVNPTG

SEQ ID NO: 2754 - protein, 105 aa, synthetic construct
MSEEQIRQNLRRFYEALDSGDAITAASLFDPGVTITLWDGTTFTSVEEFREWFESQFSTSKDALREISSLEVRGDTVEVTVRLSFTRNGQKHTVELLQLFKFVGN

SEQ ID NO: 2755 - protein, 13 aa, synthetic construct
RVVAVRVYVNPTG

SEQ ID NO: 2756 - protein, 118 aa, synthetic construct
MSEEQIRQNLRRFYEALDSGDAVTAASLFDPGVTITLWDGTTFTSVEEFREWFESQFSTSKDALREISSLEVRGDTVEVTVRLSFTRNGQKHTVDLLQLFKFVGNRVVAVRVYVNPTG

SEQ ID NO: 2757 - protein, 105 aa, synthetic construct
MSEEQIRQNLRRFYEALDSGDAVTAASLFDPGVTITLWDGTTFTSVEEFREWFESQFSTSKDALREISSLEVRGDTVEVTVRLSFTRNGQKHTVDLLQLFKFVGN

SEQ ID NO: 2758 - protein, 13 aa, synthetic construct
RVVAVRVYVNPTG

SEQ ID NO: 2759 - protein, 118 aa, synthetic construct
MSEEQIRQNLRRFYEALDSGDAITAASLFDPGVTITLWDGTTFTSVEEFREWFESQFSTSKDALREISSLEVRGDTVEVTVRLSFTRNGQKHTVDLLQLFKFVGNRVVAVRVYVNATG

SEQ ID NO: 2760 - protein, 105 aa, synthetic construct
MSEEQIRQNLRRFYEALDSGDAITAASLFDPGVTITLWDGTTFTSVEEFREWFESQFSTSKDALREISSLEVRGDTVEVTVRLSFTRNGQKHTVDLLQLFKFVGN

SEQ ID NO: 2761 - protein, 13 aa, synthetic construct
RVVAVRVYVNATG

SEQ ID NO: 2762 - protein, 118 aa, synthetic construct
MSEEQIRQNLRRFYEALDSGDAITAASLFDPGVTITLWDGTTFTSVEEFREWFESQFSTSKDALREISSLEMRGDTVEVTVRLSFTRNGQKHTVDLLQLFKFVGNRVVAVRVYVNPTG

SEQ ID NO: 2763 - protein, 105 aa, synthetic construct
MSEEQIRQNLRRFYEALDSGDAITAASLFDPGVTITLWDGTTFTSVEEFREWFESQFSTSKDALREISSLEMRGDTVEVTVRLSFTRNGQKHTVDLLQLFKFVGN

SEQ ID NO: 2764 - protein, 13 aa, synthetic construct
RVVAVRVYVNPTG

SEQ ID NO: 2765 - protein, 118 aa, synthetic construct
MSEEQIRQNLRPFYEALDSGDAITAASLFDPGVTITLWDGTTFTSVEEFREWFESQFSTSKDALREILSLEVRGDTVEVTVRLSFTRNGQKHTVDLLQLFKFVGNRVVAVRVYDNPTG

SEQ ID NO: 2766 - protein, 105 aa, synthetic construct
MSEEQIRQNLRPFYEALDSGDAITAASLFDPGVTITLWDGTTFTSVEEFREWFESQFSTSKDALREILSLEVRGDTVEVTVRLSFTRNGQKHTVDLLQLFKFVGN

SEQ ID NO: 2767 - protein, 13 aa, synthetic construct
RVVAVRVYDNPTG

SEQ ID NO: 2768 - protein, 118 aa, synthetic construct
MSEEQIRQNLRRFYEALDSGDAITAASLFDPGVTITLWDDTTFTSVEEFREWFESQFSTSKDALREISSLEVRGDTVEVTVRLSFTRNGQKHTVDLLQLFKFVGNRVVAVRVYVNPTG

SEQ ID NO: 2769 - protein, 105 aa, synthetic construct
MSEEQIRQNLRRFYEALDSGDAITAASLFDPGVTITLWDDTTFTSVEEFREWFESQFSTSKDALREISSLEVRGDTVEVTVRLSFTRNGQKHTVDLLQLFKFVGN

SEQ ID NO: 2770 - protein, 13 aa, synthetic construct
RVVAVRVYVNPTG

SEQ ID NO: 2771 - protein, 13 aa, synthetic construct
RVVIVRVYVNPTG

SEQ ID NO: 2772 - protein, 13 aa, synthetic construct
HVVAVRVYVNPTG

SEQ ID NO: 2773 - protein, 103 aa, synthetic construct
MSEEQIRQNLRRFYEALDSGDAITAASLFDPGVTITLWDGTTFTSVEEFREWFESQFSTSKDALREISSLEVRGDTVEVTVRLSFTRNGQKHTVDLLQLFKFV

SEQ ID NO: 2774 - protein, 103 aa, synthetic construct
MSEEQIRQDLLRFYEALDSGDAITAASLFNPGVTITLWDGTTFTSVEEFREWFESQFSTSKDALREISSLEVRGDTVEVTVRLSFTRNGQKHTVDLLQQFKFI

SEQ ID NO: 2775 - protein, 103 aa, synthetic construct
MTPEELIANVLAFYAALASGDLVAAKALFNPGVTITLWDGTTFTSVEEFRAWFETQFKTSKDALREIESIEVDGDTVRVLVRLTFVRDGEEQVVDLLQLFKFV

SEQ ID NO: 2776 - protein, 103 aa, synthetic construct
MTPEELIANVLAFYAALASGDLVAAKALFNSGVTITLWDGATFTSIEKFRAWFDTQFKTSKDALREIESIEVDGDTVRVLVRLTFVSDGEEQVVDLLQLFKFV

SEQ ID NO: 2777 - protein, 103 aa, synthetic construct
MTPEERIANVLAFYAALASGDLEAAAALFNPGVTITLWDGTTFTSVEEFRAWFEEQFKTSKDALREIESIEVDGDTVRVLVRLSFTRNGQKHTVDLLQLFKFV

SEQ ID NO: 2778 - protein, 103 aa, synthetic construct
MTPEERIANVLAFYAALASGDLEAAKALFNPGVTITLWDGTTFTSVEEFRAWFEEQFKTSKDALREIESIEVDGDTVRVLVRLSFTRNGQKHTVDLLQLFKFV

SEQ ID NO: 2779 - protein, 103 aa, synthetic construct
MTPEERIANVRAFYAALASGDLEAAKALFDPGVTITLWDGTTFTSVEEFRAWFEEQFKTSKDALREIESIEVDGDTVRVLVRLSFTRNGQKHTVDLLQLFKFV

SEQ ID NO: 2780 - protein, 103 aa, synthetic construct
MTPEELRQNLLRFYEALDSGDAVAAASLFNPGVTITLWDGTTFTSVEEFREWFETQFKTSKDALREIESLEVDGDTVRVTVRLTFTRDGEEQVVDLLQLFKFV

SEQ ID NO: 2781 - protein, 103 aa, synthetic construct
MTPEELRQNLLRFYEALDSGDAVAAKSLFNPGVTITLWDGTTFTSVEEFREWFETQFKTSKDALREIESLEVDGDTVRVTVRLTFTRDGEEQVVDLLQLFKFV

SEQ ID NO: 2782 - protein, 103 aa, synthetic construct
MTPEELRQNLLRFYEALDSGDAVAAASLFNSGVTITLWDGATFTSIEKFREWFDTQFKTSKDALREIESLEVDGDTVRVTVRLTFTSDGEEQVVDLLQLFKFV

SEQ ID NO: 2783 - protein, 103 aa, synthetic construct
MTPEELRQNLLRFYEALDSGDAVAAKSLFNSGVTITLWDGATFTSIEKFREWFDTQFKTSKDALREIESLEVDGDTVRVTVRLTFTSDGEEQVVDLLQLFKFV

SEQ ID NO: 2784 - protein, 103 aa, synthetic construct
MTPEEIRQNLLRFYEALDSGDAEAAKSLFNPGVTITLWDGTTFTSVEEFREWFEEQFKTSKDALREIESLEVDGDTVRVTVRLTFTRDGEEKVVDLLQLFKFV

SEQ ID NO: 2785 - protein, 103 aa, synthetic construct
MTPEEIRQNLRRFYEALDSGDAEAAKSLFDPGVTITLWDGTTFTSVEEFREWFEEQFKTSKDALREIESLEVDGDTVRVTVRLTFTRDGEEKVVDLLQLFKFV

SEQ ID NO: 2786 - protein, 103 aa, synthetic construct
MTPEERIADVLAFYAALASGDLEAAKALFNPGVTITLWDGTTFTSVEEFRAWFEEQFKTSKDALREIESIEVDGDTVRVLVRLSFTRNGQKHTVDLLQQFKFI

SEQ ID NO: 2787 - protein, 103 aa, synthetic construct
MTPEERIADVLAFYAALASGDLEAAKALFNPGVTITLWDGTTFTSVEEFRAWFEEQFKTSKDALREIESIEVDGDTVRVLVRLTFVRDGEEKVVDLLQQFKFI

SEQ ID NO: 2788 - protein, 103 aa, synthetic construct
MTPEERIANVLAFYAALASGDLEAAAALFNPGVTITLWDGTTFTSVEEFRAWFEEQFKTSKDALREIESIEVDGDTVRVLVRLTFVRDGEEKVVDLLQLFKFV

SEQ ID NO: 2789 - protein, 103 aa, synthetic construct
MTPEERIANVRAFYAALASGDLEAAAALFDPGVTITLWDGTTFTSVEEFRAWFEEQFKTSKDALREIESIEVDGDTVRVLVRLTFVRDGEEKVVDLLQLFKFV

SEQ ID NO: 2790 - protein, 103 aa, synthetic construct
MTPEERIADVRAFYAALASGDLEAAKALFDPGVTITLWDGTTFTSVEEFRAWFEEQFKTSKDALREIESIEVDGDTVRVLVRLSFTRNGQKHTVDLLQLFKFV

SEQ ID NO: 2791 - protein, 103 aa, synthetic construct
MTPEERIADVRAFYAALASGDLEAAKALFDPGVTITLWDGTTFTSVEEFRAWFEEQFKTSKDALREIESIEVDGDTVRVLVRLSFTRNGQKHTVDLLQLFKFI

SEQ ID NO: 2792 - protein, 103 aa, synthetic construct
MTPEERIADVRAFYAALASGDLEAAKALFDPGVTITLWDGTTFTSVEEFRAWFEEQFKTSKDALREIESIEVDGDTVRVLVRLSFTRNGQKHTVDLLQQFKFI

SEQ ID NO: 2793 - protein, 103 aa, synthetic construct
MTPEERIADVRAFYAALASGDLEAAKALFDPGVTITLWDGTTFTSVEEFRAWFEEQFKTSKDALREIESIEVDGDTVRVLVRLTFVRDGEEKVVDLLQQFKFI

SEQ ID NO: 2794 - protein, 103 aa, synthetic construct
MTPEERIADVRAFYAALASGDLEAAKALFDPGVTITLWDGTTFTSVEEFRAWFEEQFKTSKDALREIESIEVDGDTVRVLVRLTFVRDGEEKVVDLLQLFKFI

SEQ ID NO: 2795 - protein, 103 aa, synthetic construct
MTPEERIADVRAFYAALASGDLEAAKALFDPGVTITLWDGTTFTSVEEFRAWFEEQFKTSKDALREIESIEVDGDTVRVLVRLTFVRDGEEKVVDLLQLFKFV

SEQ ID NO: 2796 - protein, 103 aa, synthetic construct
MTPEERIANVLAFYAALASGDLEAAKALFNPGVTITLWDGTTFTSVEEFRAWFEEQFKTSKDALREIESIEVDGDTVRVLVRLTFVRDGEEKVVDLLQLFKFV

SEQ ID NO: 2797 - protein, 103 aa, synthetic construct
MCEEQIRQNLLRFYEALDSGDAITAASLFDPGVTITLWDGTTFTSIEEFREWFDSQFSTSKDALREISSLEVRGDTVEVTVRLSFTRNGQKHTVDLLQLFKFV

SEQ ID NO: 2798 - protein, 103 aa, synthetic construct
MSEEQIRQNLLRFYEALDSGDAITAASLFDPGVTITLWDGTTFTSVEEFREWFESQFSTSKDALREISSLEVRGDTVEVTVRLSFTRNGQKHTVDLLQLFKFV

SEQ ID NO: 2799 - protein, 103 aa, synthetic construct
MSEEQIRQNLLRFYEALDSGDAITAASLFNPGVTITLWDGTTFTSVEEFREWFESQFSTSKDALREISSLEVRGDTVEVTVRLSFTRNGQKHTVDLLQLFKFV

SEQ ID NO: 2800 - protein, 103 aa, synthetic construct
MSEEQIRQNLRRFYEALDSGDAITAASLFDPGVTITLWDGATFTSVEEFREWFESQFSTSKDALREISSLEVRGDTVEVTVRLSFTRNGQKQTVDLLQLFKFV

SEQ ID NO: 2801 - protein, 103 aa, synthetic construct
MSEEQIRQNLLRFYEALDSGDAVTAASLFDPGVTITLWDGTTFTTVEEFREWFESQFSTSKDALREISSLEVRGDTVEVTVRLSFTRNGQKHTVDLLQLFKFV

SEQ ID NO: 2802 - protein, 103 aa, synthetic construct
MSEEQIRQNLRRFYEALDSGDAITAASLFDPGVTITLWDGTTFTSVEEFREWFGTQFSTSKDALREISSLEVRGDTVEVTVRLSFTSNGQKHTVDLLQLFKFV

SEQ ID NO: 2803 - protein, 103 aa, synthetic construct
MSEEQIRQNLRRFYEALDSGDAITAASLFDSGVTITLWDGTTFTSVEEFREWFESQFSTSKDALREISSLEVRGDTVEVTVRLSFTRNGQKHTVDLLQLFKFV

SEQ ID NO: 2804 - protein, 103 aa, synthetic construct
MTEEQLRQNLLRFYEALDSGDAITAASLFDPGVTITLWDGTTFTSVEKFREWFESQFSTSKDALREISSLEVRGDTVEVTVRLSFTRNGQKHTVDLLQLFKFV

SEQ ID NO: 2805 - protein, 103 aa, synthetic construct
MSEEQIRQNLRRFYEALDCGDAITAASLFDPGVTITLWDGTTFTSVEEFREWFESQFSTSKDALREISSLEVRGDTVEVTVRLSFTRNGQKHTVDLLQLFKFV

SEQ ID NO: 2806 - protein, 103 aa, synthetic construct
MSEEQIRQSLRRFYEALDSGDAITAASLFDPGVTITLWDGTTFTSVEEFREWFESQFSTSKDALREISSLEVRGDTVEVTVRLSFTRNGQKHTVDLLQLFKFV

SEQ ID NO: 2807 - protein, 103 aa, synthetic construct
MSEEQIRQNLRRFYEALDSGDAITAASLFDPGVTITLWDGTTFTSVEEFREWFESQFSTSKDALREISSLEVRGDTVEVTVRLSFTRNGQKHTVDLLQQFKFV

SEQ ID NO: 2808 - protein, 103 aa, synthetic construct
MSEEQIRQNLRRFYEALDSGDAITAASLFDPGVTITLWDGTTFTSVEEFREWFESQFSTSKDALREISSLEVRGDTVEVTVRLSFTRNGQKHTVDLLQLFEFV

SEQ ID NO: 2809 - protein, 103 aa, synthetic construct
MSEEQIRQDLRRFYEALDSGDAITAASLFDPGVTITLWDGTTFTSVEEFREWFESQFSTSKDALREISSLEVRGDTVEVTVRLSFTRNGQKHTVDLLQLFKFI

SEQ ID NO: 2810 - protein, 103 aa, synthetic construct
MSEEQIRQNLRRFYEALDSGDAITAASLFDPGVTITLWDGTTLTSVEEFREWFESQFSTSKDALREISSLEVRGDTVEVTVRLSFTRNGQKHTVDLLQLFKFV

SEQ ID NO: 2811 - protein, 103 aa, synthetic construct
MSEEQIRQILRRFYEALDSGDAITAASLFDPGVTITLWDGTTFTSVEEFREWFESQFSTSKDALREISSLEVRGDTVEVTVRLSFTRDGQKHTVDLLQLFKFV

SEQ ID NO: 2812 - protein, 103 aa, synthetic construct
MSEEQIRQNLRRFYEALDSGDAITAASLFDPGVTITLWDGTTFTSVEEFREWFESQFSTSKDAFREISSLEVRGDTVEVTVRLSFTRNGQKHTVDLLQLFKFV

SEQ ID NO: 2813 - protein, 103 aa, synthetic construct
MSEEQIRQNLRRFYEALDSGDAITAASLFDPGVIITLWDGTTFTSVEEFREWFESQFSTSKDALREISSLEVRGDTVEVTVRLSFTRNGQKHTVDLLQLFKFV

SEQ ID NO: 2814 - protein, 103 aa, synthetic construct
MSEEQIRQNLRRFYEALDSGDAITAASLFDPGVTITLWDGTTFTSVEEFRVWFESQFSTSTDALREISSLEVRGDTVEVTVRLSFTRNGQKHTVDLLQLFKFV

SEQ ID NO: 2815 - protein, 103 aa, synthetic construct
MTPEQRIANVRAFYAALASGDLEAAKALFDPGVTITLWDGTTFTSLEEFLAWFEKQFDASKDAKREIVDIEVEGDVVRVLVRLTYTKDGKEKVVDLLQLLKFV

SEQ ID NO: 2816 - protein, 103 aa, synthetic construct
MTPEEIRANVRAFYAALASGDLAAAKALFDPGTTITLWDGTTFTSLEEFLAWFEKQFKASKDAKREIVSLEVEGDTVRVLVRLTYTVDGKEKVVDLLQLLKFV

SEQ ID NO: 2817 - protein, 103 aa, synthetic construct
MTPEEIIANVKKFYEALASGDLATAKSLFDPGTTITLWDGTTFTSLEEFLAWFEKQFKASKDAKREIVSIEVDGNVVKVLVRLTYTVDGKEKVVDLLQLLKFV

SEQ ID NO: 2818 - protein, 103 aa, synthetic construct
MTEEEIIANVEKFYAALASGDLETAKALFDPGTTITLWDGTTFTSLEEFLAWFEKQFKASKDAKREIVSIEVEGDTVKVLVRLTYTVDGKEKVVDLLQLLKFV

SEQ ID NO: 2819 - protein, 103 aa, synthetic construct
MTPEEIKANVEAFYAALASGDLEKAKALFDPGTTITLWDGTTFTSLEEFLAWFEKQFKASKDAKREIVSMKVEGDTVRVLVRLTYTKDGKEQVVDLLQLIKVV

SEQ ID NO: 2820 - protein, 103 aa, synthetic construct
MTPEEIIENVKAFYAALASGDLEAAKALFDPGTTITLWDGTTFTSLEEFLEWFEKQFEASKDAKREIKSIEVEGNVVKVLVRLTYVKDGKEKVVDLLQLLKFV

SEQ ID NO: 2821 - protein, 103 aa, synthetic construct
MTPEEIRANVKAFYAALASGDLEKAKALFDPGTTITLWDGTTFTSLEEFLAWFEKQFKASKDAKREIVSMEINGDTVRVLVRLTYTVDGEEKVVDLLQLLKFV

SEQ ID NO: 2822 - protein, 103 aa, synthetic construct
MTPEEIIENVKKFYEALASGDLETAKSLFDPGTTITLWDGTTFTSLEEFLEWFEKQFEASKDAKREILSIEVEGNVVKVLVRLTYTKDGKEKVVDLLQLLKFV

SEQ ID NO: 2823 - protein, 103 aa, synthetic construct
MTPEEIRANVEAFYAALASGDLEAAKALFDPGTTITLWDGTTFTSLEEFLAWFEKQFETSKDAKREIVSLEIEGDTVRVLVRLTYTKNGEVKEVDLLQLLKFV

SEQ ID NO: 2824 - protein, 103 aa, synthetic construct
MTPEEIRANVRAFYAALASGDLEAAKALFDPGTTITLWDGTTFTSLEEFLAWFEKQFKASKDAKREIVSLEVEGDVVRVLVRLTYVKDGKEEVVDLLQLLKFV

SEQ ID NO: 2825 - protein, 103 aa, synthetic construct
MTPEEIRANVEAFYAALASGDLEAAKALFDPGTTITLWDGTTFTSLEEFLAWFEKQFEASKDAKREILSLEIEGNTVRVLVRLTYTKDGKEQVVDLLQLLKFV

SEQ ID NO: 2826 - protein, 103 aa, synthetic construct
MTPEEIIANVKNFYAALASGDLEAAKALFDPGTTITLWDGTTFTSLEEFLAWFEKQFKASKDAKREIVSMEVEGNVVKVLVRLTYTVDGEEKVVDLLQLLKFV

SEQ ID NO: 2827 - protein, 103 aa, synthetic construct
MTPEEIIANVKKFYAALASGDLETAKALFDPGTTITLWDGTTFTSLEEFLAWFEKQFEASKDAKREIVSIEVKGNTVKVLVRLTYVKDGKEQVVDLLQLLKFV

SEQ ID NO: 2828 - protein, 103 aa, synthetic construct
MTPEEIRANVERFYAALASGDLDTAKALFDPGTTITLWDGTTFTSLEEFLAWFEKQFKASKDAKREIVELEIEGNVVRVLVRLTYVKDGKEQVVDLLQLLKFV

SEQ ID NO: 2829 - protein, 103 aa, synthetic construct
MTDEEIRANVRAFYAALASGDLETAKALFDPGTTITLWDGTTFTSLEEFLAWFEKQFKTSKDAKREIVSLEVEGDTVRVLVRLTYTKDGKEEVVDLLQLLKFV

SEQ ID NO: 2830 - protein, 103 aa, synthetic construct
MTPEEIIANVKAFYAALASGDLAAAKALFDPGTTITLWDGTTFTSLDEFLAWFEKQFKASKDAKREILDIEVEGDVVRVLVRLTYTVDGKEKVVDLLQLLKFV

SEQ ID NO: 2831 - protein, 103 aa, synthetic construct
MTPEQIRANVERFYAALASGDLETAKALFDPGTTITLWDGTTFTSLEEFLAWFEKQFKASKDAKREIVSLEIEGDTVRVLVRLTYTVDGEVKEVDLLQLLKFV

SEQ ID NO: 2832 - protein, 103 aa, synthetic construct
MTPEEIRENVLRFYEALASGDLETAKALFDPGTTITLWDGTTFTSLEEFLAWFEEQFDTSKDAKREILSLEIEGDVVRVLVRLTYVKDGEEKVVDLLQLLKWV

SEQ ID NO: 2833 - protein, 103 aa, synthetic construct
MTPEEIKENVKKFYEALASGDLETAKSLFDPGTTITLWDGTTFTSLEEFLAWFEKQFDASKDAKREIVSMEIKGNEVKVLVRLTYTKDGKEQTVDLLQLLKFV

SEQ ID NO: 2834 - protein, 103 aa, synthetic construct
MTPEEIFANVKAFYAALASGDLAAAKALFDPGTTITLWDGTTFTSLDEFLAWFEKQFKASKDAKREILSMEVEGDTVRVLVRLTYVKDGKEEVVDLLQLIKWV

SEQ ID NO: 2835 - protein, 103 aa, synthetic construct
MTPEKIRENVENFYAALASGDLEKAKALFDPGTTITLWDGTTFTSLEEFLAWFEKQFKASKDAKREIKSLEIEGDTVKVLVRLTYTVNGKEKTVDLLQLLKFV

SEQ ID NO: 2836 - protein, 103 aa, synthetic construct
MTPEEIIANVRAFYAALASGDLEAAKALFDPGTTITLWDGTTFTSLEEFLAWFEKQFDASKDAKREIVSIEVEGDTVRVLVRLTYTKDGKEQVVDLLQLLKFV

SEQ ID NO: 2837 - protein, 103 aa, synthetic construct
MTPEEIRANVRAFYAALASGDLAAARALFDPGVTITLWDGTTFTSVEEFRAWFEEQFQTSKDALREIESIEVEGDTVRVLVRLTFTRDGVTQEVDLLQLFKFV

SEQ ID NO: 2838 - protein, 103 aa, synthetic construct
MTPEERIENVRAFYAALASGDWAAARALFDPGVTITLWDGTTFTSVEEFRAWFEKQFKTSKDALREIESIEVEGDTVRVLVRLTFTRDGKEEEVDLLQLFKFV

SEQ ID NO: 2839 - protein, 103 aa, synthetic construct
MTPEEIRANVLAFYAALASGDLAAAEALFDPGVTITLWDGTTFTSVAEFRAWFEAQFQTSKDALREIVDMRVEGDVVRVLVRLTFVRDGEEQVVDLLQLFKFV

SEQ ID NO: 2840 - protein, 103 aa, synthetic construct
MTPEEIRANVEAFYAALASGDWEAARALFDPGVTITLWDGTTFTSVEEFRAWFEEQFKTSKDALREIVDLEVEGDVVRVLVRLTFVRDGKEEVVDLLQLFKFV

SEQ ID NO: 2841 - protein, 103 aa, synthetic construct
MTPEQIRANVRAFYAALASGDWAAAEALFDPGVTITLWDGTTFTSVAEFRAWFEEQFKTSKDALREIVSMEVEGDTVRVLVRLTFVRDGEEKVVDLLQLFKFV

SEQ ID NO: 2842 - protein, 103 aa, synthetic construct
MTPEEIRANVRAFYAALASGDLAAAKALFDPGVTITLWDGTTFTSVEEFRAWFEEQFQTSKDALREIVSLRVEGDTVRVLVRLTFTRDGKVQEVDLLQLFKFV

SEQ ID NO: 2843 - protein, 103 aa, synthetic construct
MTPEEILANVRAFYAALASGDLAAAKALFDPGVTITLWDGTTFTSVEEFRAWFEEQFKTSKDALREIVSAEVEGDTVRVLVRLTFTRDGKVEEVDLLQLFKFV

SEQ ID NO: 2844 - protein, 103 aa, synthetic construct
MTPEEIRENVRRFYAALASGDLEAAKSLFDPGVTITLWDGTTFTSVEEFRAWFEEQFQTSKDALREIVSLEVEGDVVRVLVRLTFVRDGEVQEVDLLQLFKFV

SEQ ID NO: 2845 - protein, 103 aa, synthetic construct
MTPEEIRENVRAFYAALASGDLAAAKALFDPGVTITLWDGTTFTSVEEFRAWFEKQFKTSKDALREIVSLEVEGDTVRVLVRLTFVRDGKEEVVDLLQLFKFV

SEQ ID NO: 2846 - protein, 103 aa, synthetic construct
MTPEAIIANVKAFYAALASGDWAAARALFDPGVTITLWDGTTFTSVEEFRAWFEAQFETSKDALREIVSMEVEGDTVRVLVRLTFVRNGKEEVVDLLQLFKFV

SEQ ID NO: 2847 - protein, 103 aa, synthetic construct
MTPEEIRENVRNFYAALASGDLEAAKALFDPGVTITLWDGTTFTSVEEFRAWFEEQFKTSKDALREIVSMEIEGDTVRVLVRLTFTRDGVEQVVDLLQLFKFV

SEQ ID NO: 2848 - protein, 103 aa, synthetic construct
MTPEERIANVRAFYAALASGDWAAAEALFDPGVTITLWDGTTFTSVAEFRAWFEQQFQTSKDALREILDIEVEGDVVRVLVRLTFVRDGKEQVVDLLQLFKFV

SEQ ID NO: 2849 - protein, 103 aa, synthetic construct
MTPEAIRENVRAFYAALASGDWEAAKALFDPGVTITLWDGTTFTSVEEFRAWFEKQFKTSKDALREIVSLEVEGDVVRVLVRLTFVRDGKEEVVDLLQLFKFV

SEQ ID NO: 2850 - protein, 103 aa, synthetic construct
MTPEEIRANVRAFYAALASGDWAAAEALFDPGVTITLWDGTTFTSVAEFRAWFEAQFQTSKDALREIVSLEVEGDVVRVLVRLTFVRDGRTEEVDLLQLFKFV

SEQ ID NO: 2851 - protein, 103 aa, synthetic construct
MTPEEIKENVLNFYAALASGDLEAAKALFDPGVTITLWDGTTFTSVEEFRAWFEKQFKTSKDALREIVSMEVEGDVVRVLVRLTFTRDGKVEEVDLLQLFKFV

SEQ ID NO: 2852 - protein, 103 aa, synthetic construct
MTDEEIRANVRAFYAALASGDLEAAKALFDPGVTITLWDGTTFTSVEEFRAWFEKQFKTSKDALREIESLEVEGDTVRVLVRLTFVRDGKEQVVDLLQLFKFV

SEQ ID NO: 2853 - protein, 103 aa, synthetic construct
MTPEEIRANVRAFYAALASGDLEAAKALFDPGVTITLWDGTTFTSVEEFRKWFEEQFKTSKDALREIVEMRIEGDVVRVLVRLTFVRDGKEQVVDLLQLFKFV

SEQ ID NO: 2854 - protein, 103 aa, synthetic construct
MTPEAIRENVEAFYAALASGDWEAAKALFDPGVTITLWDGTTFTSVEEFRAWFEEQFQTSKDALREIVSMRIEGDTVRVLVRLTFTRDGETQVVDLLQLFKFV

SEQ ID NO: 2855 - protein, 103 aa, synthetic construct
MTPEEIRENVRAFYAALASGDLAAAKALFDPGVTITLWDGTTFTSVEEFRAWFEEQFQTSKDALREIVSLEIEGDVVRVLVRLTFTRNGETQVVDLLQLFKFV

SEQ ID NO: 2856 - protein, 103 aa, synthetic construct
MTPEEIRANVRAFYAALASGDWEAARALFDPGVTITLWDGTTFTSVEEFRAWFEKQFQTSKDALREIVALEVEGDVVRVLVRLTFVRDGVEQEVDLLQLFKFV

SEQ ID NO: 2857 - protein, 103 aa, synthetic construct
MTPEEIRANVEAFYAALASGDLEAAKSLFDPGVTITLWDGTTFTSVEEFRKWFEEQFKTSKDALREIVSMEIEGDTVRVLVRLTFVRDGKVEEVDLLQLFKFV

SEQ ID NO: 2858 - protein, 103 aa, synthetic construct
MTPEEIIANVRAFYAALASGDLEAAKALFDPGVTITLWDGTTFTSVEEFRAWFEQQFQTSKDALREIVSIEVEGDVVRVLVRLTFVRDGEEQVVDLLQLFKFV

SEQ ID NO: 2859 - protein, 103 aa, synthetic construct
MTPEEIRANVERFYAALASGDLETAKALFDPGVTITLWDGTTFTSVEEFRKWFEEQFETSKDALREIVSMEVEGDTVRVLVRLTFVRNGEEKVVDLLQLFKFV

SEQ ID NO: 2860 - protein, 103 aa, synthetic construct
MTPEERFANVRAFYEALASGDLEAAKALFDPGVTITLWDGTTFTSVEEFRAWFEEQFQTSKDALREIVDMEVEGDTVRVLVRLTFTRNGETQEVDLLQLFKFV

SEQ ID NO: 2861 - protein, 103 aa, synthetic construct
MTPEEIRANVERFYAALASGDWATAEALFDPGVTITLWDGTTFTSVAEFRAWFEEQFKTSKDALREIVSLEINGDVVRVLVRLTFTRDGKEEVVDLLQLFKFV

SEQ ID NO: 2862 - protein, 103 aa, synthetic construct
MTPEERIANVRAFYAALASGDLEAAKALFDPGVTITLWDGTTFTSVEEFRAWFEEQFKTSKDALREIESIEVDGDTVRVLVRLTFVRDGEEKVVDLLQLFKFV

SEQ ID NO: 2863 - protein, 103 aa, synthetic construct
MTPEAIRENVRAFYAALASGDWAAAKALFDPGVTITLWDGTTFTSVEEFRAWFEKQFKTSKDALREIVSMEVEGDVVRVLVRLTFVRDGKEQVVDLLQLFKFV

SEQ ID NO: 2864 - protein, 103 aa, synthetic construct
MTPEAIIANVKAFYAALASGDLAAAKALFDPGVTITLWDGTTFTSVEEFRAWFEEQFKTSKDALREIESMEVEGDTVRVLVRLTFVRDGKEEVVDLLQLFKFV

SEQ ID NO: 2865 - protein, 103 aa, synthetic construct
MTPEEIRANVERFYAALASGDLAAAKALFDPGVTITLWDGTTFTSVEEFRAWFEEQFQTSKDALREIVSMEIDGDTVRVLVRLTFVRDGEEQEVDLLQLFKFV

SEQ ID NO: 2866 - protein, 103 aa, synthetic construct
MTPEEIIENVRRFYAALASGDLETAKSLFDPGVTITLWDGTTFTSVEEFRAWFEAQFQTSKDALREIVSIEVEGDVVRVLVRLTFTRDGQTQEVDLLQLFKFV

SEQ ID NO: 2867 - protein, 103 aa, synthetic construct
MTPEEIRENVRRFYAALASGDLETAKALFDPGVTITLWDGTTFTSVEEFRAWFEEQFQTSKDALREIVSMEIEGDVVRVLVRLTFVRDGKEEVVDLLQLFKFV

SEQ ID NO: 2868 - protein, 103 aa, synthetic construct
MTPEEIIENVKNFYAALASGDLEKAKALFDPGVTITLWDGTTFTSVEEFRKWFEEQFKTSKDALREIKSIEVEGDVVRVLVRLTFVRDGEVQEVDLLQLFKFV

SEQ ID NO: 2869 - protein, 103 aa, synthetic construct
MTPEEIRANVRRFYAALASGDLATAEALFDPGVTITLWDGTTFTSVAEFRAWFEKQFKTSKDALREIESMEIEGDTVRVLVRLTFVRDGKEQVVDLLQLFKFV

SEQ ID NO: 2870 - protein, 103 aa, synthetic construct
MTPEEIRANVRAFYAALASGDLEAAKALFDPGVTITLWDGTTFTSVEEFRAWFEEQFQTSKDALREIESLEVEGDVVRVLVRLTFTRDGKVEEVDLLQLFKFV

SEQ ID NO: 2871 - protein, 103 aa, synthetic construct
MTPEEIRANVRAFYAALASGDLAAAKALFDPGVTITLWDGTTFTSVEEFRAWFEEQFETSKDALREIVSMEVEGDTVRVLVRLTFTRNGEEKVVDLLQLFKFV

SEQ ID NO: 2872 - protein, 123 aa, synthetic construct
MSEEQIRQNLRRFYEALDSGDAITAASLFDPGVTITLWDGTTFTSVEEFREWFESQFSTSKDALREISSLEVRGDTVEVTVRLSFTRNGQKHTVDLLQLFKFVGGGGGGNRVVADRVYVNPTG

SEQ ID NO: 2873 - protein, 118 aa, synthetic construct
MSEEQIRQNLRRFYEALDSGDAITAASLFDPGVTITLWDGTTFTSVEEFREWFESQFSTSKDALREISSLEVRGDTVEVTVRLSFTRNGQKHTVDLLQLFKFVGNRVVADRVYVNPTG